United States Patent Application Publication US 2015/0086982 A1 - sequence listing, part 4

SEQ ID NO: 72 - DNA, 1913118 bp, Aspergillus oryzae
tgaccctaatgttgaccctaatgttgaccctaatgagggattcccccgggggcttccacctctccccccgtgggagaaataggcgtccagtgctatggcactcggtgagtgcgggtatggtaaggctgggggcatcgatacgtactgttggactgactgggggagggtgtagatagtacccgcggtggacgtccgcggccgcgtcgcctgccctgggagctagtctgcggtgccatgtcgacccgctaatgtagccgaccaagctaggtgggaggggaactggttcagagcaattccaagatcaagtatagcagcggaagagaatgtatagatagggtcaagataagggtcagcgtcgaggtatagaaaaggatcctccgctattcccaatccagtgactcctcttctgtcttccaggaatagaaatattgcccctacctctatagtatactgtattatatcaacaacacgtcctaactaagcgatccatacagatcggatctatgccaagaaaatccgtcccctgaattttcagccactgctctttgtttgtttgaattttcaaccaccacttttccaagaccgaatctacctgattagagtcgatcccccgaggcttgggacgcctgctcttcgtctgcaaaaattttcaacttcccataggcagggtggatgtcttgtggttgaccggtatccagatcaccgcccgttccaggtacacacggcctgggagtattctggtaagagaacccggccacatgttaacagcgagttctgatactgtgtaatatagctaatgaccctgaatgtccaatagtgccctgcgcgtatcagtgtccccttctggctctcctccccccccccccccggagggctgcgccatggcccgacgcggacgtccaccgcggtatgccaacagggatgagaggaatgcggagcgtagaaggcggcgcagggagcagggggcgagtcagatccctcctccccctgaggcccagcttcaccatcgctttctcacatggataacaacagaggagggagatatccatccggacgtggtggagtcccgtgatatattccaggatcttgagcagctggtcttggatggaggggagttcgccgagggggccggtgacgctgagggcgaggatgacatggacatagatggagacatgggcgatgtcccagactcagatgtggagatgggggatgtggagcgggtctccaggcggagcgctgagggtaccccacatgaagatccatccgctgccggatctccaagcctctctgggcctgccggccgcttccccaatacagcggaggcagaaggccaaccggtgtccacacagcccacggcggagaccgcgacccactggtcccacgggcccagggtcgcatcgccggccgtgccgcttcccccggaggacagcgcgcggcaggaggtcctcgctgagcatctggtgaagcagctgatccgtcatcggggctgcggccacagccaggaggagccgggtccaatcccggaggaccaggctgggccgcggagccccccagcagtgccgaccgtgcggctgtctgaggtcgtgcaggaggagtaccccgatgtcctctcccgggacggcatcgcggcgtacaggccggcatgggatgagtacttcccggtggaccggcggcggcgcctgttcagcggcgtcgagaccatccatgccgaggatggcgggcccggtgagctgcaggggatccagccggagaggaccccgcctccacagctggatctggagcaggactccgacacggccggccgcaccttccaggttcactttgatattgacagcgcgggtgggttcgcgtcaagtctcgcggtggcccgccaggggctgtactgggttggagtgcggccaccggtcagtaacctcaccggctccctgcacctggacggtgtgcccgtgcagttccaggacggggacagtgggcgatggcggcgggaccggcggccggtgcaccgcatcccccacctccccctcggccgtgtgtgcggattcgaggcggtggagatctacatcctcttcccgcggctgtaccaccccacgcgcaagagctttgtgattaccaaggacgagtacacgctctggatggatgaggtgttcctcccggccctgcacgcgacctactcagagtcgatcctgcagaatctgcccgtcagcgcggcggatgcccaggccagggccacggcagcgtcggcggagcagcccatggagcatgacaagcggccccgcgtgcagctcctgcagtatgggctgcggccggagctccttgactccctctggcagggggtctgcgcccgcatcgaggggcagggccttgcacagttccggggcatgaagcttctcctgacatgtaagaatctgaagagccgcacccagggccccagctgggcggcggcgcaggcaagattcttcgcgatctggtcggaggcggtggacgtggactttctgaccgacgacttttacgacatcgggcgggaggccatccttccccagagccgcccggccggggaggcgggcccaccagcgacctttctctcgtggcgccggtgctgcctggaggggtttagccactggctggaggaggtcgccgccacggtggagggcggcgccctgtccaccgcgccggatcccatcggggtcaccacggggccctcccagcgcgcggtgcgacccacgacacggcaacaggcccggccccagggccccccggtgtcggaccacgagagcgacggcgacgtggagtatacaccggcggaggcggaccgggaggggacaggggcagtgggtgaggggccccggccggccaaggtcaggcgccggtggaggcaggagatgtaccccttctccctgacccgggccatggcgacgctgaccatcgagcccacccggcgatcgggcctgcggaagctgggctatctatacagccagcactataactccgggaaggcactcttcgcggccggcaaccactacgtcttcagcaacccggccctggacacgctcgcgctggacgagggcctgatccgggcatggcagcacgtcggccgggcggtaagccactccccgatggcgctgctccgtgcgtatcggtacaccaagcaccggtgccatatggcccttgcggactccggccatcgggcgtatggtgtccgcgaggagtaccgcgtgagcggggggcttctccgggcggtggaccggcgcatgtgggcgcaagggctggctggccaggagctccacgtgccgcaggcgtcggcggacccgtcgacggaccccgccccgccccatctgcccttcttctgccaccggaccgatctcatgctccgctggctgcggtggaacatcaacaagttctgcctggggttcgagatggtctacggcctgcggccgcggacaatggtccagtgggagcacacacgcgtgatgatgatgttcctccgctgcctgctatttgccttcggggggcagggcgcccacccgcgccgctgtaatgggctctggctggatcgacgcgtccgccccgcggctgacggctcagagcgagagcggatcgatgagggcttgggtatggagcaggcgctggagcagtacggctacgcgtggctgccggaccacaagatcgactgggcctcgatgaccttccggccaccgcaccgggcccacatgtccttgaacaccccgaccctcctcgcggcctaccacagccactaccgggcggttctcagcacccacagtgacttcctactcttccacgatgtgttcgcgcggatgtacagcctgcgggaggaccgtccgcggtcggcgctgctgctgcagctgctggtggacctctgcctgcgtgccttccgtaaggatgtatttgcagtcttagcggagcggagtggaacaacccagccggtccaccgtaggcagatggaggcggccttggcgggtgaggttccgctgacagtgctgggcctccggcgggtcttccagcggcgacccctgggcgacgatttccgatttgtggagagtaggagtgcaaaagtccaccatattgaggtgctcttcgcgtggctgtggggctggcagggtgatggtaacaacggtgactgtaatcgtacccactgggagaagaagccctaccggacatacatgcgccagtgcttcgacactattgcccaggtctatgggctccgtcaggcgcgtgagtggcggacaaccctgcagcggacctttatccggacccactgggtcctcccgtacccaagcgaccgctcattctggtcacgggcgacagggacccccggcgggaaccggttccagacgtggctgagtgtgcatcccggtctggtggagtactaccgggccacggagcccactgaccccgcagtaagacaatcagtagtgatcaccccgcaggatgtcccctatctcccagtgtccggctggcagcgcgcgcagagcccgatgccactggatattgccctgccgccgatccccaccgacctggatgcctacctggccgcggtcgcagaccccgccgggcccgacaccgatctggacatccccctgccggccattggtgttctggacgggccgatccagcaatatatactggaccacaccccggagaagaggatcctgcggagctaccagcgggaggagacaactgcggtcagtagtatccatagtgactccaagtggctgatcgcgcacctggagaatcaggttcgagtgctgcgggatgcctatctacagcggcagagagatctaagcattccgttttggaggcgtgtagatagtgagtctccacagtatctctttacagcaccggctaaggtcctagaggaggattcagactctgagaatattaggaacaagcgtacccgggcagagaagaaacattgtcggtatgagaaggacctgcgagacacccaccgcctggtccaggagtttatggatctgagacaggagatgaagatcataaaaaaaactatccctggtgcagttagtccagcagagagtaagcaggagttggttaagaagcataaagtagtgcatgagagggcaaaccagatccggaagaaactggtggtgatttcaaagagggttatagaggaaccagtagaattataatttagcttatacagtgtatatgaatatatatattatatagattaataaaagggtaatcacaaagctagtagccagtctgttatctgcagatgggatgcaggagagatattacatgtaacccagctttctagtgtttgtatgcggttcaatgacagggcggtctagataggcagaattggcgactactgtatatactactataacttattagatcagtatataagtttaaatattactataaattctataaaaatacagagaccaaagaagtctatagataaatgaattatagttcctactttattagaagatatttaatagagaccaatattataatataagaatataaaagattaacaatcagtactatatattataaacagtagagaggaaaatatatatttccatatagtttacttaaagatctattcaatagaatttaaaagacgattttaaagtatatattgtttatatagctatttattttatattataagatattatatatttatttaaaagactctataagttacagatacttatagatcctatgattctaagttttgatatcttatgcagtggtccaaaatgcagtggtccaaaatgccggccaaaaatgattttctccctgcatttccgaccactgcatttcgtgccatccacactcagaaaaagtagcaaatggtctggtagatggtccaaaatgcagtgtttgaaatactggcaaaaatgattgactatctatatttcagaccactgcatttcagaccatatacaatcagaaaaggtgatagatggtttagtagatggtccgaaatgtagtggtccgaaatgccggccaaaaatgattttctgtctgcatttcaaaccactgcatttcgtgccatccacacttagaaaaagtagcaaatggtctggtagatggtccaaaatgcagtgtttgaaatactggcaaaaatgattttctccctgcatttctgaccactgcattacgtgctatccacacttagaacaactagcaaatggtctggtagatggtccaaaatatagtggtctaaaacaccggacaaaagtagatagctggatggcctaaaatagccaaggcagaagagtaaatagctgctggcccttatccaaggcacatacgcaattcaccagcggtccttctattacagatttaataataatcatacaagatgactatgccggataccctgccccaggtatatagacatcttgggggctgattagtaatattggcatctatagttattcactgccttctaatgatatatactagatcctatcttaaaattatatatagagaatcttagggttctttagctataagtttatattagaaattatagcaggaaaattaagaatcaatcttctatctttagtatctactgtctagtgccttgcccacgaatccttacctagttgacaggtcctctaccctgacttgtagatattcctctgacacctttcttgacctgacctgggtaggagttgttataatctatacagatcatgcgggttgcatagctatttttcattgtccccaggagtcctacacaatggatagctgtcttgtagatctctaaggctcatagatatctgatattacctttcctaaggggtcataactttaaccagcactatgtgattgttacagacccttgtctagtgcaccttatcgaaggtggacacacaaggcagaataacaataggatgacaatggccgattcctgagtggaagacacccgacgaatcgtttatctagtagttattcggaaaggattacaaatgccgataccagctaccacaacgtaattatatgtattgtagcagtgccataactaaatgtatcagcgacacaacaagctcatagtactgataagatgcatcgtatcactgacacgaggaatcgtagcagtgacacaacgggcaaggatatataaggacacttattcatgtacttagtttagttcttcgtgatcaatatacattgttactacagagttatctttagtagcaagaccagtctcaactcgtttgcactctcttaactattaggtatacatacttaataggcctggccctttagactcgagtctagtatcgacggcagtctagtgtcgactgcatcccaatgacgacgacagtctagtatcaacggcagtctagtaacaacggaagtcctacggcgactcccgcctcaccaagaccgcaacacgacaacgacggaagtcaaagaacgacttcaggttagtaccctttgaaacgtggtctactaactggtctcagacttgacgacgaagccccgggcgtaacaactatgtgatctctatagataatatttaatctaagttctaactaaatattgtataggagagaagatatttgtataaaggcggtcagtgaagcggatgtattatactggcagaatattagaatagatagcagagcttcagtaaagtatcagaattagggtcataaatttctctatatctacaatactatagaggctgttattaaaaatactatataatttagtagttaataattcaattatcaaaaaattataaacagaaagacagtgattgatatactgaataatcatggtacaaaaatcaaattgggttagctcgatatatccactaacccgatttgatttttgtaccatctctacccgctcagcatcaacaacttcaaacttcaatagaaatccaacagaaaatcttaaaaatatataagaaccaccgctcagcttgcagagagatgctctttcgaatgcagtagagaatataggaattaggggttgtggtggttggtctttgtgtcatgaattcaccctatagacgaatctttcccatccccggggcgaagctaccccgggaatcttcaatacggccgtcgggataacccattgacgttgtgaatatcccgaaatctaaaacctggatctatcttccgggcggtctttggattggaacaatcctatatatctctatgccgttctcaatacaatcggctttccttgtatatcttaaaatttaattgatcatggttattggaaattgatgaccagcgggaatataatccaaacgtctctgatattgtgaatcactatctataatttatctatcgtacaaattaatcttgcatcatggaataactggaaatctataaatataaatctttcctccattaaactgcactcggaaatccttctcgcatcttgatacggatcacccggcttatttaatatcaatcatccttatattgtcttattatcaaccctgatatggaattattataactccttttttttaatatcacaaatcctcttgtatcaatattatataccctaatattaaaatatattatgtctttaaatttttatattcgaacccctcttttaaaatattattatttctttggttgtaatattattaatccttgtataaaatattataaacctctatcttgtgatatttctaatccttatataaaatattacgaacccttatatttgcatattactcttatgtggttatattaattaccctcatcggtctatatataatctcaattaactcaattcttatcttttggggtcgatatcgattcaacttctcgatctcttctgcgcgctgaaatctatatctaatcttaataaatgaattctatggattgaatcttattgatatatctggttatattggtccagtcgatctaaatctgactaatctcggtaatcggatccaataaatcggatcaatttggtctctcgatttacctggttgtgttggacggtattaaattctaatctttcgatatataaattatatataatccttaatccacttaatacccagtaatggaaatggatggaattaatattcgtggatacggtatatataatatcttaaattctgctaaattgttgggactttgatctgggtattaatttaatgttgaccctaatcgggactattaaaatgggataatcaaattcgaatcggatctactaatcggtttcgctttcttcgggttatatttactgcatcggagctgactggctgcataaatgaatagttttggttgatcgataatgctggatgatatattattggaattaacaaccatgattaatattctatccaaatatatatatattaatatggttccacaataaatatatatccacttcttgggtaccgactatgcccatcccggttggacctgaatatatactatcgggaactactatatcaatcttaataatcgattgtccgggcccttggcccctggcaatacttgacgggttgaccctgaatcgatattgacaattatcatctctacgacattaaattctataaatgtattttgatctatcaatcgacggaatatatatcttgatgaaatttaacaagtatattttgatatctcgatggatggatcctatatattgattctatatatctatatcttggatatacaacctcgaatccctaatcccgctggcactgctcgagctcaatatatatccgccgcaaccagcaaaacgacgcaaataaatgactgtgctggcccttggccccggctgtggcctgtccaaaaaaccgtttcacctgcggtaaatcctgccagtcgaccccaaatccttgcaaccggcgcgcccacaatggctgtacccgggacgcccacggcccgtacaacattgctgccaccatcggaattatcacatcgcgatattcgcagttcgtccaatcccgtgttttccatcgggggcacatactctgcggcattccacacccccagcatgcgctgtacggcggatactggatcttcagggatcgtataaacaacatccagtcccgcgccgcccggctggccagactgcgacatgaatacaaatcatactcgttccatccatggccctgtattgtacaaatataacatgtccgccgccactggggggtatcctgctcgaccagctcctcgtccagccactgctcggcatcctgtatccgctgctgtatatcgggggccgcctgccgttgggcctgcacccgctgccgctgccgttcgccaatgggaactaacggggcctgggatacaatcgatccgttgcggggggaatcacgggaatcctccggggtactgggacggggatttgcacggggaccacgattatctgaatggcctgcacggtgtgcacggtgtgcacggtctgaatggtctgtacagtctgcatgagcggaacaacctgaactggatggtaactgccaattgggattgcatccattacaccgcatctcctccgcgttctcatcccggcaatatcgtcgctcgtacccatccacgggcccatccaaatacccatctaatacatatcggcggcatcccacccccggaaccacgtccatgtaatcctgcaccggctcgtccccctccactggcccatctggttgaatgataatcgcctcgctgggctgcccgtcccgtccggcccgcccgctttcctgcgcgtaatccaacaatgtccgcgggatcccaatatggataatacatcggatatcgggaatatcgacccccatccccaacgcacttgtggccgtgatcacctgcgtctgaccctgcgtgaatcgttgtaaaatcgatggcttgtcaatctgctggctgtaatacgcctcgcactgtaatatctgggccaattccctcacctgccgaatagcattcgcataaataatcaccttaccacgtcccgcccgctggattcgctcccggataaatgccagtacgggcgcgcgggtaaaccacatcaatccaccggggacacgctatacacggtatgctacgttgggacggccggtacgatcccgcaacacacggacctgatcggtctggtactccatccgctgcaacaatgacggctccaacgtggggggcaacgtggctgttaacaacaccatctgcgtccgcgcgtggttcaatcgccccaactgccgcaactccggccggaaatcccgctggtcatgcaacaccacatggcattcatcgatcacgatgcggtccaaccgccgcgtctgctgcaatcggttgatgaacgtgtggaaatcgtccgtgacggcggactcgggcgtgaccaacacaatcgtggcgtcatcgggcggccgacggctctcccatgacacacatgctatacccaatccctggcatcgtcgcatcatatcgccgcgtaatgaaatcagcggcaccaccacaatcgtggtcccgctgggctccgcgaatgtgggcaacatgaacaacatgctcttgccgcccccggtgggcatcaccgccaccaccgggctctcgccgtcctggatggcccgcaacgccggggcctgcaccccccggaactggatggccgcctgaccggtcatctgctgcaatgccgacgtcatatccatggtgttcaaccggtgccgccgcatcacccggccctgctcggcctcgtcctcccacggggaccgcttccgtttgcccgcggcctcgacgggggccccgtccgcggcaaaccctaaaaaccgatgccaatccgtgctggacaaccggaacatggcccggcgccgcgccgtggtcccgggctgctccatgatgtcccgcgcgtatatcatgccggccgtgtggggggaatgcgtggcctgctcgtccgcgatggcctccatccactggtcctcgtccatgtcgcactcggggggcacctcgggggccttctcctcctgcacattgctggggaacgcgctgctgggccgcatccaccgccggctgatcccaatcgcaatctcgcggtacgcctggatattgacggcatactgcaaccgcatcttggtctcgcgcttcaacacctcgcggaaccgttcggatttccactcgcgctgcgtgccggggtcggggccccaaatgtacggcgacgtggacgccggtggcggcttggacggtgatgtggttggggggatggttggtcccgacgggggctcggatgattcaccggccgggcaacggtgccacgcctctaattgctgcacaaacggcaataccaaccacaaataccatatgatcagctcaccgacttcccgcggcacataccgactgatgaccttgacatcattgctggcgtaaaaccccttgtgatacgcggataccaatgtcaccatcccatcctcaataaatatattgcgccgctggttggtctccgtgttaatatactgcaagctcagcaactcgggcgcccggctcggctgcccgcccacaacatgcaccagcacggccaatttctccttgaatcgggccacccgctgcaaatactgcatcaccaaccgcggctggaactgggtgggctggcgccggtggataaaatgcgcctgcacgtcgggctcggcccgcacccgctccatgatccactgtgcgccctccaccggccatgctgtgcgctgatcgcgcaaaaagctccatcccacggcgccctgcgtggggtcgtcgtacaatgcatgccacgggatggcgggcgtcttcccaaacatcaactcctggcacaatatctgccgggtgaccccagtcaatccatgcacgaatccccggaaatcgcccatggtgaactgcatgtgtttgtacaacaatcggtccggatgcatccacgtcacatgcccgggggtcgtggtgttgtaatggatgcgcaacccgtacgtccgccaatcctgcaatgtctccatcggggtatgggtgccgcggaccatcaactggctgaccatccacgtcacctgctcctggaatgtcttgcgggacggggtctggctccacgggatccgggatgcgggatccccatttcgcatgggcgatgtcggtggggatgatgggggttcatcctccaccccgctgccgtacgcggaatcggcctcgatatcgtccatggccgcggcgctgcgtaatgtccatgcggcgcaactctgcggcttttgtcatgtctcgataatggccatcacatcgggatccaaccacaatgccttctggacgatcataaaccgggcaatcttgatcacccgggacaaaatcggtggataactctcgggatcccgccatccaaactccccccggcccaacacggccatggcgcatatcagcacactctcgtactcctgggcgtggtatgtctggttcatcagctcgatgcaaaactccaaacacgcccgctccatgtcactcatcctccactgcggtggctcgggatcatcctccccggaatcctctttgtcattctctgccgtgggggaatgggcggtggccatctgccacagttgacgccattttttccgctgccgcggcgtcatcccatatggcggatgcttctcggtgcgcgggacctgtgtgcgggcgatgaatgccaatatctgctgccatggctgcatgtgtttgaccacgctgtctggatccatatatgccagcaatggacggtatggtgtctggcccttcgcggaccgcaccgcttcaatccgaatggcttgtccggtatgctgcaccgtccactggctcttgcgcaccacgccttccatagctacccacatacgccacacaccctgctccacggggtcgtccgcgtcgggtaacggggtggccaccatggcgcgcaatgcatcaaaatcactgggggtggtaaactcctgcaaataccgggtccatccggtcacccgcagccacgaattggcatcgtggatctccccggtcccactgggtccagtctgggtcttcattgcctcccacgctgcggtaacctgctggatcgcctggttcacctgctccgtgcgcacgggaatgtacggttctttctgctggcccccacggatatggatataatgggatcctctccgcgacgggaatatctgctgacatgtcacaatcatatacgaccgccgcagctctgcttcctgggattgtcgctgctcccgcgtggttcggccccctcgggcatgctgggaccatccgtggaccgtccgccagtgattgcgcatggtctttaagctccgtccaatatattgacagcccggatagccgcggcgacataacaatccgtccgggtatgtgggcagctcgggaaacgcctgatccacctggtgggggatctcaacatcctccgcacgcggggcaatatcctcccactgctggacgatttgttggatctggaccgcctcggcgtgtttcttaccatggacggtgcttttgacgtggtgtataatctcattgggctatacaccatgctgacattttttgcaaatgatcacgggtaatccgttcagcttctgaaaaatcgggtgttccatggctgatgcgatatgggtcctgtacggggaacggatgatggaaaatgaaatggaacaccaacggaattggggggaagtaacataaaacacatggcttaatatgggatgttattgcccctgattcaacacgggttgcagttgactggtcatctttggatacggaatctaaaacaaaggatgccattgccggtataccacaggatgggaatgataattcggggtttgctgggccaactggtaaattattactggatttaatcaatttcttaggttggatgtatctggcctggaataaaatataatctgaatgggttctgctaaagctgctggtcttgctggcgttgctggatagttaaagttgtggataattaatggaaagccttacccggtcgggtcgtaccccaagcaaacttccaatggaatactatggcccacctgaatcgatctctactactgtaaaccatgggatttgcatttgaaaatcgtccaaatgtaaatttccatggtgctctctaatctacattaatttaagcgtcatcagccttgtggttcagttagtatcgtacttaaagtgcttcaatccatgatactcagtttggaaaaaaccctaacccgctccgccaatccatagctgccgtcggctccacttcattccatccttctatgaatgctcacccccttgtggactaggggaaaaagtggtggaaagccggtggtgaacaggcggacgttgatatacttcggatatgacaggcggggccgccaggcggatagccaaaccttatcggtccaccatggtgcgctaagccggatctggaatagtctatcttttatatccgagcccagcctgcatagaaactggaaacagaaacagtttttatattttatattatataatatataaatcattatctttgtaatcttgtaattatttcagacaactattcagatctatagtaatcccaatataggagtattttatatcttatatcatacttaatctttctttatattaaactatctatgggtcaatacacatatatatatctcgggtttagtttctttgaaaaactgttgaatgatctaagtatctataaagcgatatacttaatacaaggatatatatattaacaatacagtcgattaaagaagatagaataatcaatcacgatccatctctagcataatatattgccgctttcgaggcagttcatctgtattctcagcagatcgcttccgtggaccgagataggtctcaaatcctaggaaactgtgccacttccggctaatcgtacgatactgccgccgccgggcctcgatgtgacctggggcctcctgcagaccccgagcgtagacggtcccagctacccaggatccatggcttgcctgatggtccaccgtcgtatcatccgccccgtagtcacgcttgaaccccccgcattgcagatggacccgggagatcgcaatcgcggcatggcgataggatgtaatattcatcttggtttgaagatgggtcttcgcctcgcgttgtagtaccattcgaagccgactgctatcccaacatccctcgccggacggccaaagaaaagccgatgggatactggtatcctggaaagcctgccgctggagagcttggcagaagggtaggattaaccaaagataatagaccaccaactcactgaccggcttcgggagatatcgatgaataatcttggtagtattgctgattgagtatcccttgtgataggtggtcacggtgctcaccagtccatgttcaataaagatattgcgatggcggccatggaccgtattactatggcgtaggctgagcagctcggtggcacgtccaggttgaccccccgtgatatgtatcagaagcaggagccgctggaggaaagcttcaacctgcttcagatagtgatccacgtgcggcttctgccagataacctgactgtccgactgccgtacgtccaggaattcctcccgcagccagtccagtgtcaggacccgatctaagagccagcgctctgccgccccgcggtggcggccgtgggtagtaaacatagcctgggagagagtggcctggttccgtggatcgtggaggaagttccacccccgttgattattagtcgggtcatcctgaagctcccgcagtggcagcgacggaatcatctcctcgcggatctcctcgggatggaggagaaacaactgctccagctcgtcctgggccagctgaacctgcgtggcagtaaactggcggaatcccttcatactgagctgaagctctttgtagctcagggtctgctcgtcgtcactccagtagatatagccgagactggtggtggtgttctgaatctttttgccatatgtccgcagccgggtaatccatccaaacggtgcccgcacgccatataataagaagcgctcacgcatctcgtctaaggcatccgctggatgaccgacctcgccgtggtccgccatctcgaccgcccgctccgccaccagcatctgggcgatcttgaccagcgcggagagataggtggtatagtagtttgggtcccggaaattagagcaatcagtgttaattccgagaatggccagaaaccctaccacggtactttcgaatagatctcctttcagagaatgatcgaggagagcaatcgagagcgccagacaggcctcatccagctgatcctccaaggtctgggtcagataccgcgcctcggaccggctatcggccggttgatcaagcagccgggtaccatactcctccatctgatccagggccgccagctgcgctgtggtcagctgatggcggaggacaatcggctgatcggggcggctgctgcggtaggcaaagcagatcagccgctgccacacctggcggtactgccggtacgtggatggacggaggtggatctgaatcggccgattccacacccccggccggcggaagaaggtgttgatctggatttgatcaaactcattgatccggtggctggcgatagtctggtaggcccggtgaatgagccgctccacactttgaacaaagacagctagtaagggttctttctcgctgtccggcatcgaccctagcggagccaccgagacgagattctgaccctgcaggtactcgggccaacgggttaattccatccacggagagacctcgctggaatgcttttcgatcgggatagactgttgctggatagcctgggcttgctgatcctgctcgtacgcctggttaatctgactctggataaactcagccttgctcatctgagcagccttctgaattcgctctgtctggcttgctggcataacggcaaagaaatggctagccgtcccggcgatatagaaccgctgacagctgacatactcggcagtagcagcaagatcgggtttttgatggcaatcccgaccccgtggccgccgggtatcgggatggctgtgactgagatgattccggagagtattggacgaccgaccaatataggagcaacgaggacagcgtaatcctgaatagataggaagatggggaatcgggggactgtctggtgaaggaaatcgactaggctctttacggggctcaatccaaggcttcttaagcatctcagtcaggactgcctggcgaagctccgcggtcttgaccgatggatgctgtcgatgatgggtacggagatgccggtccagatgctgcggggtgaccgcataatgacaactggtacagatccagagacaatacgtttcattatacataaagagatccatcgagataggattttttacttgcggatccaagatgactaaaccgatcaagaaaagaaaatcgaaatcaatagctagggacacgcaccgctgatgggcaggagcacgcacgcatgggtgggggcgcagatcgcagcagggcgggccaatgggcgggcgagtaaatccagcgagggctcggtggaccacgcactagggtataggctggcgaaatttcagttggatgggaccgtagtggcccactgggatacatgtcaactggcaaatgggctgcacgcttgaccctaaacgcggccccccgccaaacgggaccccctctaattgggatccaggtctgtcccattcccccttctaggttaggataaaatgaatgcagagagacttgcacttatggctatccacttcgacaagtatgatttcattaaggccctccgtccgtggatctttaagtggatatatgattgtcaacccattacgactgaggaggagtatggctatcttctacttgctgcacaccttttccgtgagaaagatcaattttcccgactatctgcgagtgctcagacttgacttccacgcgaattcatcatcaaatgacaggaaattgatattctgaaagttcctacctgatgctatttggggtacgacttttctatctctctaaaccttattgtctgaccatagacggctaattcagcggatcggattgagaaccttcagcagaagataacgtacgaattgcaatccgttgagggctccttgagaaatgaccaaagaggctttgagatgcagggactagtttgtgtgcgctgtggaagaacacaaccaaattcagcaggaaagtatcatgcctgctgcaatggacaactctacgtcaagcattgcaccgctgactattgtgtggcagaatatttttcagctttgaggaaatctgagctctggcattctgtaccagccgttttgcatctgttctgcagagactattgccttgctaatatctcccgcaaaagccaacttgagacccgctgtcaaatcaaagcgcaagtagagctgcgtaacttgataatgaaagtaggagataatttccataaatttcctggcgaagttcctatacctagccggggaggcagagctgcctgagagccagtataagataaagttgaaccagcgcctcacccataaagttcatgagatgagtattgcctaccggggaagtgacaacttttgacaagttctgagctggtcattatagtcagccgtagttcctgtcttggtaccatgtttaatcgctttgcactgcaaggtcaaagagtatctgcggattgaatcaagtagtatgagcctactaaaccccattgaagaaactgaaaaagaggggaaccaaaaaagggaagatgctgtacaatacgcgggcttctttcgcttaccagttagatgggcgaggttgttgagtttagatccagatattgatagaaatcatcatgttcacttttcgcatccatgaaaaagggcattgtcacgcagcttgcgggtatctgacagtgaaataccggcgataacattgggttatcgaatttgtgattaattatttgggatggttccatcctgtatatttcatcaaaggcatcgaagtcactgttggataattgcgacaggccgtgtgaagtggtagggcttccctctccttgtaaccacactggttcaatgtatagcggattctgaggaagtgtttgaggttgaagcttgattgttgacgcctgtgatatgaagcttggaggcataggaggaagttcaaatggtacgcaggcatctccagaacatgagtctgtgggcggtgtttgtgtgctctttgaacttctgtttgatagatccaggttttgaaagctcccagcgctctgatcccacaatttctgctgcagagcctcgatattttcttcaaaataactctctttcatatggtccagaacgccgagctgtgtgagtagatcatgtgtaagtgggtgaccatcttgtccgcatttcactggactattttgcgggcgttccctcttcctagaaagttgatataatttctgaaggccatacacaagccaggtctgttgctgctctagcatctcaacatatctgtatacgcaagttatacgttagcaaaactcacgtcctatttgtcacatctcaaaaataaaaatagaaaagaatataaatagcaaggccatcgctaaagattgatgctcaccccttggggtacaatcttccataattgggagttctcttcctctcgccaaagaaacagatagaattatctgccctacaccgtccacaaggtgtagtaccgtcacactgtagcggtttaaggcgttaaggaatgatgatgtgttaggctgtggcttgcttacctttgacttctttaatctacatcgatcacatgccttgcttacccttttgcgaagattgctatccgaacgtgaatggcatgaggtggttgatgattgatgtgcgttcattatgtactattcaaatagtcaaccagacaaagcactgttgatgaagcgagagaatcaaggcatcagtttcactggaaggcggaaacagaacttcccgctgttttgacattggaagctaagggtgttcgacgatacaacaaaactcgtcgaacggcgaacggtggacggaaggaagcaaaaaagaaagtaacagagttacgtaccaatatgaatgtcccagatggaagattaatggactttaagccaacctaaggtactgaagtggctgggtatagttatcgatgagggcaaagagtcgacagtttttgtgcagatcgaaaggcgatgttgatgttaatgggatttatagtacgccatagaagttaaatggagagattgactacagcctacgaactgtaaacaaacgagtgatatcagcattatatgggttggaagtagtcatggtcgtgccgcagctgcaaataaatccacttccgttcttctccgatctacctgacgcgccgtacccaacagacctagcaggggccagaatgcccaaagaggaaaaaagcaagccaggctagctttctgcggcgattcccttccccactccacactaacctactaatatcctatccgccagtaccggtcgcgggcggggcaattttcctgtctggattggttatgcttgccgccaaggcattgggtgcatgcaatgaggttaatccattctgcacaggttgatcggcgacgactatcagatccaaccaaggacaaggatacgtacccctgataaggtaacttggcagctagtactccgtaattgaacacacattggacatgccaaacatcaagaaacccaaaagcagcaaaatcctggacctgctctgcgattgtgtgatcgactacacaggtatagcgtgcgtatcagtagaatacgatccagctcaggagaacaacaatcatgacggcctcttacatgcttcgagcttgtgccgagattttgccgagatgcaaccgagattgtgtggatcatgcgtgatttaataatttccaagatacttcctcttagagcgttccgcttcgaactgatcggcttccatacccgagtagcttggatgaatgattaatggaaacaacaagaatgcctgcttaagataaaataagcttatgttactaggccgacagatcttggctcttgatcatcaaggttgtcacttatgctagattcaacagggtagcctacgacaggagttgttcgctgccacttactagagggggaaagcatatgttcatgtaatgctaaatgttacagtatattatacgatatttctataatccttacaacagctatttcgatgtatacacaagtaggtggatacttgcagtaggaaagtaaataagcacctcaaggagttcgttctcatcttccaaaacgtggtggagtgtagagactccctagtagaattcaagatagtattatcgttcgttatcttatcctttagctagaggtccagctacgtcatcgactcccaggttcacgaatattactcaagatggaatacagaagtcggagagggccccaagaccagcatatcagtactctctgttcttatttactgcttagaagaaacctatgattaattttagcaaacgaattttccgcgtaagtggataaaactagctattcttagacggttaattatcgtcggtgagtggtcaatgtagcctaatcaggaacctgattcgagatcgaaccaagctctcggcctcttctacagaattgtagtctctgcctgaagccctcattcttggctcgtctctgatttactgtatgaatctgaatgactgtgcttctgaatgggaaagtcagaatcgccttcatacttttccgtggttttaatctgagacacctgaatgataagttgacactgcagcttggacttcctacagctacatataccttcattcaatacatgttgatatgggttttcaagggcttgagctgattgcaaccgggcatagttcgcttgagagtccagagcagtctgtatatcgctgcattattcccgattagtaaatccacccctatctcccacgccgtcctccctgattttcccgattcaaaggtgagtaccttcataaggagtagtagcttgtccactattggcctaacaaggtggatctttgcgcgatattccaacattctgatggatagtaagcacttgtttccttgtctccggggccacacccgccaaaactcggctgtgagtgcctcccacagagcagtcgctgcatgtagaaggtatgggtaggtgtggatacagtagttactagtaattacaacccctgtagcacgcagattctaaatttggctttgctccagaacatcggtctatgtgtatatatatgtcctttccctcccctaaagtcttggttagttgaatgcacactccatatcttcttctagttcgacggaattcagaccccttcgttgctcacgattacctcttcttctcgcatcatggagaatccagccaatgatcctcttaactcgggggcgcccactgaatgtggtgaatatgacaaggatgcagacacggaaaaggaaaccctcactgttcctgaaatccgaggagccgccagcgcagagacccttatagtcccaggcactagcaacgctgtcagcacagaaaccatcgcctcgcccaattgtagcgatatcatttcaacacccaaaaatgacccaggatggggcatgaccgatcatgtcatctcgacaagggaaagagaggaagccgcgggttacaagccacgacaattgggcatcacctggcagaatctgactgttgaggtgccatctgctgagactgcagttaacgaaaatgtcatctcgcaattcaatataccgcgagtgatcggagactttctgcgaaagccgcctctgaaatcaatcttgcagggtagccatggttgtgtcaaacctggtgagatgttgctggttttaggccggcctggttctgggtgcacaacgctgctcaagttgcttgctaatatgcgtcggggatactataatatcaccggggacataaggttcggcagcatgtctagtgacgaggcccagaagtaccgagggcaaattgttatgaatactgaggaggagctcttctacccccggttaacggtgggtcaaactatggactttgcagcgcggcttaagattcccttccaccttccggatggaaccaagtcaaacgcagactacacagctgagactaccaagtttctgctggaggcaatgaagatttcacatacagttgatacaaaggtgggaaatgaatatgtccgcggtgtttctggtggagagagaaagcgtgtttctatcattgagtgcatggctactcgaggctctatctacacctgggataacagtacccgtggtctggatgctagtacagcactagaatgggcaaaggctcttcgagccatgaccgacgtccttgggctttccacagttgttaccctctaccaggcaggtaacggaatctacaacctgtttgacaaagtcctcgtattggacgaggggaggcagatctactatgggccggcagctgctgcaaaaaggttcatgcaagacctgggatttgtgtatactgatggtgccaatgttggtgagttgtcctactactctcccctggaagaaacagccgtattgatttatttatgccaggggactttctgactggtgtgactgtcccaaccgagcgccagatcagaccaggttacgaaagccgatttcctcaaaatgcagatgccattctagctgagtataagaattcgccagtctatcaacatatggttgcagaatacgactaccctaacagcgatatcgcccaccagagaactgaagacttcaaggaatccatcgcctgggaaaagtcaaagtatctacccaagaacagtccgctaacaattagcttctggagtcaagtcgaggcttgcacgattcgtcagtatcagattttgtggggggacaagtcaacattcctggcaaagcagattctgtcaactattatggctttaatagcaggctcctgcttttacgactcccctccaacatctctgggcctatttaccaaaggtggtgccgtctttttcgctcttctttataattgtattgtggccatgtctgaggtcactgaatccttcaaaggtcgtccggtcttgctgaagcacaagtcattcgccatgtatcacccagctgcattctgtctggctcaaattgctgccgattttcctgtgttgttgatccaatgcagtgtattctcgattgtgatatattggatgtccggcttaaggcatacagcagccgcgttctggaccttctgggttattttgtttaccgttaccctagtaagttcctctatttgataaaggccgtggggtctccgacttcttttcccttcttcctgtttcacgattcctatttcgtcactacggcatccgctgataattatgatacagtgtattaccgctttgtttcgttgtattggagcaggatttagtaccttcgaagccgcctcaaaagtatccggaactgcagtcaaggccatcgttatgtatgctggttacatgattcctaaaggccaggtcaagaactggttccttgaattgtactacacaaatccgtttgcctatgcctttcaggccgctctcaccaacgaatttcatgatgagaccatcccctgtgtcggcaataacctagtcccgaatggtcctggctacgaaaacgtgccctcgggtcataaagcctgtacaggtgttggtggagccgctcttggtgcagactttgtgactggggatcagtatctcacgtcactgcactacaagcattcacagctgtggaggaactacggtattgtttgggcttggtgggcattcttcgcagggcttactatgatttgcacctcattctggagtgatggaggcaattctgcttccctatatataccccgcgagaaagtcaagcatgggcataagtcagatgtcgaggcacagaatgagaagaatcccaatcgaggtgcgggcagcagagtctcaggcccggaagatgaacatttaacccggaacacctccatttttacctggaaggatcttacatatacggttaaaactccagctggagaccgggtcctactggatcaagtgtgtgggtgggtaaaaccgggaatgctgggtgcgctgatgggctcctcaggtgctggaaagacaacactacttgatgtccttgcccagcgtaagacagatggaacaattaagggatcaatcatggttgatggtcggccattgccggtttcattccagagaatggcaggatactgcgagcaattagatgtccatgaaccctatgccactgtccgtgaagcacttgagttttctgctcttcttcgtcagtctcgagatatacctgaagatgaaaagctcaagtatgtcgatacgattatcgatcttctagaacttcatgatcttgagaatactctgattggtacagtagggaaaggtcttagtattgaacaacgaaagcgtgttactatcggagtcgagctggcctctaaacccagtattctaatctttctagatgagcctacatcaggtcttgatggccagtctgcatacaacacagtcagatttctgcggaaacttgcagatgctggtcaagctattctggttactattcaccagccctctgcccaactctttgaacaatttgataccttactacttctggctcggggaggaaagacagtttactttggtgatattggtgaaaacgctgcaacaatcaaatattactttgggaaaaatggcattgaatgtccaccagaatccaacccagctgactttatgattgatgtggttactggtagtctggaagctgccaaagacaaggactggcatcagatctggctggactcagacgagcacacacgcatgatgattaatctggataatatgattgccgaagctgcttccaaaccttctggaactcatgatgatggctacgagttctctatgcctttgtgggaacagattaaaattgtgacgaagcgtatgaacgtctccttgttccgaaacaccaactatatcaataacaaggcttcattgcatgttatttctgccttgctgaatgggttctccttctggcgagttagccctaacttgtctgctttgcatctgaagatgttcacaatcttccactttgtctttgttgcccctggttgtatcaaccaactacaacctctctttctccagcgccgtgatatctacgatgcccgagagaagaagtcaaaaatgtactcgtggtttgccttcactaccgctttgatcgtatctgagtttccttaccttatcatatgtgctgtgctctacttcctctgctggtattactgtgtccggctctttccccatgactcgaatcgatctggtgcgatgttttggattatgatgtggtttgaattcgtatatactggtgagcgttttcacgtcctatactcctcgtcttgctctggataagtacttgttaacacgtttgtttttgcctctaggaattggccagttcattgccgcttacgcccccaacgctgtgttcgctgcgcttgtcaatcccctcatcatcagtatactgctgctattctgcggtgtttttgtgccctatactcaactcaatgtcttttggaagtactggctgtactatctgaacccattcaactacgttgtggggggtatgttgaccttcggtatctgggatgctcgagtgacctgcaacgaggatgaattcgccgtgtttgacccacttaatggaacttgtggcgagtacttagccactttcatggctgggaacgggcagagaattaatctgaccaaccccgacgctacctcacaatgcaaggtgtgcgagttccgaacaggaagtgacttcctggcaaccctcaacattaaccactactatgttggttggagaaacggcgccattactgtcctttatgctatcagcggatatgcattggtctatggactgatgaagttaagaaccaaggccagcaaaaaggccgaataaatcccattcccttcttccctcccttgccccgctttttcacccttgtcctttattctctttcgattacctcatttggaccaacggatgacgtcgagtaatcatcttccatgattgttccgtctcctcactcgttgctttcttgccttaccattatagactttcttttaagcttcttcagggctagagctggcatcgggccgggttcgggcccaaaatctaggacccgcacccgtctcgaacctcgggccaacctaggttgacccgacccgaaaaagcccgaaaaacccgctactagaccgaattagataagattttgcttagtaattagatatcttatctatataggcttagactaaaattttaatctgatttttatagcgctatatctctatcaattctatatatattgttagtaggggcttccgtctggcggcctggaggcccggaagtacgggttcttccggcccgctaggcgggcccacaacgcctagctaggaagatagaaagcttagataggatgagaattcacgaatgaatgaaaaaagtcctcccacctatgcattaatatataaaatcaatattttctatatatatatattctatattttctagtttctttgactatattatactaagaaaagtccacttagatttcctggattcggggcgggtttgtgcaatagaatctgaacccggagccggattctgtcctctgagtctgcccctggaaattgccgggttcaggacgggttgggcttttcggggaacccggccaactttagttgtatgtctggcaaaaacttcttcatatggcgtgaaagtgcccagcacctcaaaggtattagcttccaggatgtcatggaattaaacttattgtagtcgcaatgtgggttagttcgtagtgtcaaatatataatccaaactgttagtcctcacagttgagcgctaatactctctttgcatgagcttggtcattttaagtttttaaccaatatcgactttgccaaggagtcgaagagttcccatttcaactgctaatatcgatacttaaatggccccaagagcgcggatgcaactttataacgcagatgcgctaaatgctagaacatgacaagacccgtgtatatctgccaatcactgccgtttacgggaaaacaggtaggccatatttgatcaactaaactcagcttgatgcattattaagaaacaatatttcatgtcccttagttatagcatcccaaattctgataacaagtgtatacactagatagactcagcctatcgaccttggtttactatcttgtagttgttagcttccatgagcactttgggacctgcggggccatggttcgacatcattctcagaagatcgcaatgaatttgagccgccagagtattccaccagatggccagctggtaagcagagctcttgattgaacatctcaggatgatggcaaagcataaccattatctcagcggtgcctacgtgaatttagtccacccgccagagtatggacctattaagatgtacaggcctcacagacttgtacccgaacaaattgagcataagctgctggttagcaagggtactcagcaatacatgatgaaccgcatttcttccagcgatagcaagtccgtacacaaatggacaacttttgaggagcatctcggtcccgaaaggttacggcctttaccaaatcagcaacacagcacattccactttcgaagatgacttctgggtcgtttcccgccccttccacaatctccgagagcatgtccagagagcccaccccaccaccctactggccgctaccatggttggactctacgcctccctgcatgccatgctgaaccgccagtttcacatactcagcggtttgtatgtccttcagtgcgatcggccagtcccaatgctgacggcagaacggtagatctgcccaaccatgggttagtccgggaaaagtgatatgggcccaatcagccgctgcagtcgacatgtcttcaaagcttctgccgtgccttttctgcgaacttattcgaagtatgggatcggagaaactgatttcaactccgacactgtcatttcgcagaacccaggctggtgcgaccgcaatcggatactcatagccccagacatatctgaaactatctgctaagagacattctttcgccagtcgttcccatgtgtgaggatcaaatgataatcctgagttttctgtcatggagcccttcacagtagattcccccaacccaaccaccggggaaatgtacggcagtagatgatgctgagttgaaggtactgtggctaagctaagcttaattggttcttccctctctctccctgaacttaattattgcatatgaaaattaaagtgaatttatagagacgtgtgaatccttttccgataaagaattgaggtatttttccgtagcagcttggttatcacgagtaatctatatggaccgaaaacgaagtcctgacgtagtactattatgggaggcgatcgtgataggcgaatcaatgtctcgcctccgcagccgcgaggcgccgagggactttcggccgacaaaagcaatcacatcataactccccaaatcaggcaaccccactggttgatgctagatattattagttagattctggtctgccggcatatggcggctacatattttgaccgaaaccaagctcttctgattttctgaggacttaccagtaaaagtcttttagccctgagtagcttgtatcttccatctctaatatttcttaatcatgtagacctgatctttctcaggaggggccaccaactacccttttcgcatagcgagcaacgcaaccaagaagctcaagtgcaatcaatactgcagtaagtggccatgggggcgtgagccaacaatgttcagatggctgagccgtttagattatcaatgaaacggtatgtccttttgtatacttgctaaggtcttatagaattgggttgatataattataatggccaaactgagtgtcatactatttgcgactcatgtctacaagggatgggtgggccctacttctttctttgtggcctcactgaaagtatgtttgttcttactatctagctcgatcacgcaatgatcttccagtacagagcagattttgtctatacaaaagccgttttccaattaatcccataatatatgtgtacgatccaagtctattgacaagtgactattcactgagcttcccttgaactgtaataatcctctttagaaaatagctagactgaagcataataccaactttccgctgttgctaaatgtgatagacccaaaaaagaaaaaaagaagctctaccaaaaagatttacacagaacctccgagattgttaactactcatttgatgtctgtggcagcctatcttgttacatgttcaattttgagcgcctcctgactaaagctctagtctgtcccaactttctcggaggaagtacattgagtattgtattttcgcagctcaagctgcccttcggccatggctttctgcaattgccaggcttggctgtctgcttcaagccgctcaatctttcgcaatagggcttctttttcccgtaacagtcgaagaatcatacgctccttatgttcgttgcatgcgaccatttcgcgtgtgtgctgctggagcgtagctgcttcgtagcgtgcttggctcaaaagtagctcaattctgtatattgtatttgctgtcgctattgctgcgttcatatcagtgctgctataatcacgtttcatattagatcctggctagagatcccacctggacactgtgcgggggttgtctttctctggtcaaaagacatcatattaggcagtgaaccgatattcacatgcaatagacttcattgcaatgttggttaaatcatatcagttgcgccctgcggcggttggatatagatatcgacttacctccctctgcaacatccaggtgtggctaaggtattgttgaccctattgtttaatttactcgactggatctattgaaggtcatcggtcttactcagcaaccaagcaactaaagtaggatatgctagtcgacacaagtctggaaggctgagacaaaggaacaatatcatgttgcgtcattttttttcccagtgacatagcttgatgtgcagtgtactaatatgcaggcagaaatgggtttctaattctttccgggttgtaggggaaagggaacgaattttcaaaaagacgacgttcacatgactcaattttacaaccaaattcctgccaacttggcaatgctgatgagatgtaaatggcgggatcacacggtttggaacgatatgaatatccgctggaccgggcgatgatgggatcttggttagcgcgattttctactatagaagctttttgttctagactggcgaagattcggtgttggaggcttgtttgcctatcaatcgtgacggcccactggaagtccccactatatccaacgggattgctacccggttaaatccctcatctaactggtagcatccatatcactgcgttactgcaagtggtcgatgatcagacgggtgaacgcatttcacgttatctgcaaacatcagacaaaaatgtttggaaggttatctaaaaattcggtgtccggcttgagcattggagatccaggccacggccaccaccttggacttgtaaaagaaacgctaattccaatggaccgcgataaagcacgtaaagatgctggctgttacttcgtagctttctcggtgccgagaattctcccacgctactataatagtgtatgcacatagtttactccacttggacgagcttatcaagttaacaaatcaaaatacagagttaaaggtcgttacatgggaatcaataaatttcggatcagcgggatgctgttgtaaattgtgctggcgggttaaataccatataacctttcctcaaccgaagaaataattcattatgacaagtatatgttgagccacgcttgcaatgttgaaatggccatctgtcgtcggactatatagcacatatctaccttttctgttacattcaagacacttgacctcatttctgcattctcactcataaagcttatctttttacattccacacgctcataatgccgcaagagtcgtccgatgaaacccaaagagtcagtctcaatacgttgaggacagaaacacgggagactcttcaagcatcgagagtgacggaaaatagtccaccactgggtgtaaactatcctgagcttgggcgtccagcagagcccctcttcccggaagaatacactgttgagacacaaacaggcttggttccggtcagaactcttgagagcatccggtctactgccatcggcgcgccacggccttcaactcccaatgttgaaaaagcaagtaagccgtacgaatttgtgacttttcagattaatgacccggccaacccatttaattggtctcgtttgtatcgttggtatatcacgatggttgtgtcggcactggttgtctgcattgcctatggctcttctattgtcactgggggcctgggcttgatcgaagaaaaatatcacgtctctctggaagtggctaccctgacatgttccatcatggtttgcgggtttgctgtgggcccactactgtggtctcctttatcggagataataggtcgacaaccggtatacattatctcgctggcgctatataccatattccagatcccatgcgccctgtcgccaaatatcggtggcctccttgcctgcaggtttctgtgcggcgtcttctccagttctggtctttccctggctggtggtaccatcgcagatatctggaacattgaagagcgcggtatggccattgcctactttgctgccgcaccgtattgtggccccgttattggccccatagtctgcggttggatcaatgtcggctcacatcggctcgatctcttcttctggaccaacatggcttttgcaggagcaatgacgattatcgtcgggctcattccagagacatatacgccggtaatcctcaagcgccgtgcaaagaaccttcgccaggaaaccggcaacttgaatatcatcacagagcaggagcaagccaagccgagtttccgcgacatcgtccggatcagtctcatccgacccattacgatgattttaactgaacctgtgctagatttgatgtgcatgtacatcgtcctcatctacgcctatctttatgcttactttttcgcctaccccgtcgtttttggcaaactgtacgggtacaatgatggccagattggcctcatgttcattcctatattaattggcgcgggcttctcgctgctcattacgcccatgatcgagaagcgtttcaagcaagtgtgtcggacgcgggcgcccacacccgaagatcgtcttgttggtgccctactcggtgcaccattcatccccattgcgatgtttattctcggcgcgacgtcgttcaagcatatcatctgggttggtccagcgtcatctggcatcgcttttggattcggaatggtgctgtgttactactcagtgaataattatatcatcgactcgtatcagaagtacgcggcgtcggcgctggccgcgaaggtgtttttgcggtcaggtggcggagctgcgtttccgctgttcacaacccagatgtatgaccggctggggttgcaatgggcgtcatggctattggcctttattggagtagcgatggtgcttgttccatatgggttttattggtttggggaaagaattagagccaagctgtctcacacatgagctcagatttcaaaacacagttgcaactgagctgaaatccttggtatggagacctccgtagaattcgatagaaggaccaatcattacaatctaatatagagtaccctttttctaattcccggaaatcggagggaatgttgtttatatagaatttaataagacaatttcagtgcgatgtgtatattcggtaacgcaattacagttttgtctccatgagcagaactccattacattcagacaagctcgaatataagggagcctggaatgctcagcaggtccattagagactacggtttcatatattaatgtacgataaaagttgcttgtacagtaacatgaaagaaagcttagcgctcacaaatctctccttcctcagccagattggccaaagttcttcgcatgtaatgttggtcattacacaacctcccccagctccttcccgccggttgtttccagttgtttattccttgtctggctaactattccactagactggcgtttggccaggttaggttaggttaatggggtcagttatacctaaccgctaggttatggctaggttaatagaatttctatacctaaccacggttaagccaaaaattggatggttaacctaggttaaccgtgcttggtgctaagattgttgatcctttcccagtatagcaggcggtaagttaggttaactgtggttaatctagtattaacctcactatcttaaccgactgtaagaatactctattaacaatattaaaatatcctgtttattgattgtatataaaaagaaagtatatttttaagaagattccccatttaaataaggaaagtatagaaattagtatagctatagtcttattccaattatccagtagtataattggccccttaatagagcttgcctagagagtatatatataggaattatagaggattagtattttactatctcgttaataaataaggaatctggccttcaataactatgctaaagaaataaaaccaaatcatctgtaaatagactgaagccgattgaatataaaccttggagaaggggccaagtgaatataactataattaaatcgtatatactgatctggttcctagtctaaagcctagctaatatttatacagatcttaattttctagcaagagctataagatataactttaaaaatagtctggctataggatggaataacttctagctatctaaacaaaactgctgtcttgatagttataatacttagtctatataatattagagaagagtagtactagaagctatgttaaagctatattcttagtaatagagagatggcggggactagatatagaaagataataactattagtatagaacgcgcgagatttgtataggaatccatctagtaactagcctaataccagcctagactaaggccttagtatataggtgggcgatgagggtagggaactgtgtaattataaggtaaatttgctaagagaagagaaaacaatgccgctgaggagatggctgagattagactctcagcaagcaggcgatggatagttataaaacagaatattatagatatataaggctatagacaacaggctttatagtagtatagggccgggcggtgaggggcggcatttctagattgggcaagaccatttccagaagcggcggcctttaaaagcaaaatactataattattaatatattaaaataaagaatcttaaaattctaaatatttagtttaaataaataaataaaattatttagaagtatagtatagtcttaaataatatttataattttaataaaatagaatttataatacatctaatagctataactaaaattattattagatttaatatattaagaaaactatttcttttatagttaaaaaactagaaatagattattactatagaatatattaattttaataaatagactctatttttctatattatttttaaaaataaaatatatatagaaatttaatataaaaataataaaattcttttttattaaaaaattaagattagttctaataattaaataaataataaaattagtctatattaactatagaactattttatattttatactattaattaatctataaaaaaatattatttatttattttaaataattataatagttatttaatatcttaatttaattaaatctatataaaaaataatattatactaatctatatatctatatatattttttataagctttaattatttaatattactattttcttactattaaaagatttatataaagatctaattaaatttaagatatataataaatttaattatattaataaacttaattttttaaagatatatttttaaatctatataaagatttttattaatagtaatatctatagtatttttaaagttattagcttaatttttctaaattttaaatatattttttttaactaataatttagcttaaaatctttatatctttagataatagatctaatagctaaaataatttaatatttaaaatattttatataattaaatagttaaagaaattaaaatctatatttaaaaagctacttaaaaattaatctcgtagtattaatttatctattaaaactagtttaaattaactaattaaaaatattaaataaactataaataatattagactatatataaaagatagcttaaaaaataaaaatattttactaaatagattattttttaaaaagatatattagtatctaaatcctaaatccttattaaatactaaaattagatagataaagctatatagatagatagatctctatctattaaattaatttctagacacgctttatctaaatattctagctataatatatagagccataaaattatatattatccaaatctatagaactacttatttttatatagaagtcagaattcacggtattttaatcattttaaatttttatatagcgtgtggtacatcacccgcttatatacgttgctcacttatcgattacattacaggacctagttacctaagataattgatattacagaaaaaataattcttaatttttctactataatttctaatataaatttatagttagaaaaatccttaagattctctatataatttttagatagaggctactatatattattaaaaagataataaatatagatactaatattattaatcgattcccaagatatctatatacctagagtagggtatccggcatagttaccctatataatcattatcaaatctgtgatattgtgcatcgcattatattatctataatggatatggccttgtggtggatgtctattcaacgcctattgaagtagctagaaacatctagactatggagaaattaaaacatacaaattcccagctatcccagaccctcttttctggtaaataaagcaacatctggattagcgaggttgtcaactctcccttccgacctcacaattgctttgcgcttcgtgattattgggaatctatttggattcaagctgctatgcaggcctctacagtaaggattgcttcgtaattcccactattgcttatcgtcaggttgatatgtcagggaagacgagcatcctaaagagtcacgtcgaggttttctgtgatatccatacacttacctgtccctgctcttgaaagctggctgtgacgctaaattttccatgctgtcgcagctttcataagcatccccaggatctcgaggtcctgtcgggcatcagacggagtcgtctttggaattttcccctccgcgacccattgatacacttcttttagctcaagcatgaaaggatcttcgtatgtccgccgtgtggtggattccatatacgatccgtcccgtaaagtctccttaaccaccattgttgtcggcaaacctttgatgaacggggaatcgatgcacaccttaacagtcttagtgtcaccgaaaatctctatcgaggcgtcgaaccttgcgacctgatcgacaccggactcgtaagcgaccgcgaagttggggtactggaaaattgcactgtcatcgttagcctggctaagacagcgattgttttgatgttacctccaaaatggagaccccacagtggcacaaggtgagaatcctatgacccccttgggcatacccatgatctcccgcatggcactcaaatcatgtgagccaagaatagagagcatctcccacatcatatgtgtttctttcgtgacggcaattccaagctcagcttggagagcttgctccatgtcatcaagtgtttttgtacgtagcgcttcggtatccgcctcgcgataatcgttaaatgtctttggatacgtcccggattgtgccacaaagacagaattcggcccaatgatatcccggacacgagcataacgtatttgttcaatgcttccaacttctttgactgcatcgacgaaagctgcagcatatctcctcatgtaaccaatgaacactctagccccacctgcagcttcgtccgcagcaatgattcggtccgtatcttgcaaagtcaaagcaattggcttctcgatgaagacgtacttgttggcttgcagcgcgagtactgcgtgggatgcgtgaaaagcatgattgcttgctatcaatactagctccacttccgtcgcattgcatagttcttcgacgctccgggtagtattgggcctgcagctacctgcaaccttgagctggctatgcttcatagcgtcctcggagacatcgcaaaggtatgtgacctgaaagagatgagaaagggagtttagagagggcacatggacgacttgcgtgaccatgccacatctatcaacagttagaatgcgttctggagcgaagtgtaaatgactctaaccgaccctatgataccaactttaatgatacggccaccgggcgcggcttgagtaggcgtcatgccgaacattttggaggttgagtaattcttcaaaaaggacagcagcctttttcctttcccgtgtatttatcgacgttggatacgtaccaagcatcaaccactgactaccacgggggatgtagctatgatatatgttgcggaagggacagttgtactttacgtgaactattgaacggagcggatcgggttagtcgggtcggatgatccggaagcttcaagtccaacaggtccaacaattgccacgttgcaaactcatcaccttgtggccgtactccgacgtgctatgatcgccaaagggccaatgaccaaattgcgcaactaggtaattcgttcatgggccgctattacgcctcaacctcagtgtgctgcgattagttgagaattgacaaacatcgtgatatgtacaatatacaactttcaatctaagaggttttattgttctatccccctatatctataagcccgagaagttattactttttgtagtggtttcaatcggttttcaaattattttttaagcatttttcaaatatccggagaatgatcattgagattctatgataggatttgaaatatcgtaatcaaatataggtatgtccatattaggtaggaagctccaatcaaaactgctgaaaccccctagttcttccatattgaatatctcccgtggcacagaaagcccagccactgggggctgtatctgcgcatcttcgtcagaagtagcttcggatcggaatgtatgttgatgaagagactcggagcattgatcgaggtattggagctgctcggtcttctgcaattttgagagaccaattaatttcgttgcgagtttcaacgcttccgttatcgtcgagctaggtatggcacgcgccacgtcttcgaatacttgcaaggctgttggtatttgtgcaaacgagctcgccgtgtcgatgacgagcatagcgcagagaaattgaaaaggaacattggctagatgccaccaaggcttctgctgctgcgcaaggcgcttcgctgcttgtagaccatcaagcccaatttcaaccagacgagcgaatgtctgcctgtcgatatcagcggtctcacttgatcgtagaacgcgatggaaagagagagccattatagtacgcgacagcagaaccgcgtcgtggcactgttgggaattgagcgcagctagctttataataccgagttctatttccccatatgtgggatgattatccggagaaagctcctccgagatgtgataaaggtaaatcatctgttcttctggcgtagcagaaacaggatcggaaggcgtcggcggtacaattaaggtatcaaaagcagtcttgatcggcgactgaccacactggtttgcaatccaagtgttcaacaagcgtgcgatccacaacgtccgccggggctcacaaaataagccccgacactttgcgacactatctaagtcttcgatatctgtctccatcatagcgacgctatgcatggtcgtgcagcttgtaatccacgtggcataggttcgggcagttgagcgcagatatagcgttttgagcaccaacgctgatattaggtcgaagcttggtgtggaaatccgtgaaatttcagcatctaaacaggcttgcgcatttcgagcaagagccatgtgccttttctcttgggttgcatcaacatcatcactaaaaagcgcgccaagggcagctatgccaaagagaatagcatcgcgtggttgaggcccacctgtggaggaggaccttgcagttatcatatcgtgaactagagttgggcgcatgaaggagtatactggatgcacactctcaaagtaagttgaagcgaactgttgcatatggtccaacgatagagctgaagttaacgtcgcagacgcgtcattgtcagcagaaggtcccaacaacggcgcggactgcatcatctggtcaggttgttcgtcgtcaaggtgtgcttgtagtcgatctgcgagcgacttgctggatgaagcataagagagggcttctcgagagatggcctctcgagaccgcccgagctgtcggcttttgccttccgcatgccgcttgagagttggtccggtccctgacgaggcaggattggatctatgggtagtttgttctggcctggatgtctggctgagagctcgcttgagtcgaacatgcgattcgagggagaagtagcatttgtgccggtatcttatgcaggtggtacacggctccgtgccatcgcagcgctttttccggtgcttgcaaggctcacatgccctgagagccctatgacgctgcgctcccctagtacttcccaactgttccgccatgtggtcggacgggtcctaggtcggtgaatataccaccaagaaacgaggtgtcacagatggccgatacagtatggtatggtatgcaaagatggggccaatctacccaaggagaacctatccaatgataggataattaagttgcaaaaaagatgaaaagagtggatgatgcaaggacatgttagggtgtccgtgtattttactaccccaccttgctcgccacgaggcttcccaacgtggacagaagacggtcggggcggatcggcaagctccaatcgggtgatccgcctggctccgaccctaacaaacgagcccgccgtgcagattcagcaatttgtcaacgcgctcagctagccccggtgctgtgattatcgtacattggtcagagactataaaatatagagacaagagaatactgtcatggacaccctgccacctgggactgaccatctttcggcttctgacatcctgaagagtcgatgatcatgcaatccatcaagcagtatcgaaaagtttaccagaccatccaatccataactcacctcgaatcacaaacagtcggcaaccacaatgctattgatcctcatgcctcgacggatcccagcggccatggagataaacaggacagggacgccaacattcatccttttacacaccgtcccatcccagcgccacagaatacccggcaagtggccgagggcgagcaacgcagctgcggctccaaggattgtgcagcaggcatgcatgatttggaaaaacaaatattgcggatgcgccgccttacattgtggtgaactttgatggagactgcgatcccctgaacccacagaattggtcgtatggctacaaatggatggtcactggtgccgtcagtcttaccagcttcatagggaccggggcttcagcgatcgactcggagattgtaccgcaactcatggaaagttttggcgtaggcgaagaagtcgctctcctcggtacagcgctgttcatgattgctttaggtctcgggagcttgattagtgcgccgttttctgagatcttgggaaggaatccagtgtatattgtcagtacgttgttgtgtgtctctgtgtcaatgcccatcatgtcgcgctaacactcataggtcttatcatttttggtcttttcaccatgggagctgcgcttgcaccgggaatcggatcgtggcttgcatgccgcttttctgctggtctgttcagctggcctcctcttactaactttggtggcacaatagcagacgtctggtcgccgatcgagcggacctatgtgtttcctgtgcttctttgcttgtgctttctgggacctttcctagcaccaatggtcgctgcattcataggcggtagttcagtggtcaactggcaatggacaggtgcgcgcaaccattcggatttgatgctcctgtaagtcgactaacgcctcactatagaatggctcacactcatcttgactggtgcgctggtggtgacattcctcctgttcgttccagagacatttcccccagtgctactcagttggaaagctacatcattgcgcaaggtgactggtaatcaattatacctcgcggagcatgaggtggacgccattccactctatcggagacttcaacgcagcatcaagttgccattgaagcttttacttactgagccgatcatccaactgttctcgttgtacatgaccgtgatctatacagtcctctttggcttcctgcccgggtatggtttcatattcggtgcccaagggatctatgggcttgatcaagcacacaccggcctttgcttcattggtatcaatgttggctttcttctatcggtttgtcagaccttccaaggagttataggcgcctactgacaagcaaaacctccagatctgtacagtctggccggtctatgttcgcttcaaacgtaagctgtttgaggctcgcaaggaaggaaagcacaaagtcgtgccagaagaaagacttacccacgcaattattggggcgcctattctgccgattagcatcttctggatgggttggtcaagttggcccagtgtcagtctctggtcgccacttgcagccagtgtagccttcggcttcgcggtcatgcaactctatatctcatgctatcagtacatcatagatagctacgagatttacgcggcgagcgctctggtgggcatgacattaacacgatactgcgtggtaaggaccccgaagacgagtaattcaggagccctatcgtgctgatcagtgtgtctttaggccggtcctatggtaacagtttcggtacccatgtatgagaacctaggtgtgcactggactctcaccttgttgggatgcatcgcaaccctgttggcaccggtgccatacgtctttaagtactacggtgccatagcgaggaagaggagcaagggggcaacgagcttcgagtaaggtggcctactgctagcagacaacgtcctggggtggaggtgtttgatagtatgagccagatatcaactaaatcaatgaagtaaaaaaaaggagtgcattcaaacgaaataactacttaggtaaagatgaaggaaggagagacaatgtggaaaggtcctggaagatacattatagtacggcaggatctactttctttcgcgaccaagattcggtcactatatcgcgatactttccaaaccaatcaacaacctagttacatgcttttaactacatgatcaatgagaatatcatgacattcgagatttctactagaatgacgctggtcagctgttcatcgtacaagacgagatgttaagggactttcgagagctgatagaggcacgaacatcctgaagtgcagcaccgcctagataatgagcaaggatctcatctttgggggtttaagattagtttgatgtgctagcattagtgctgaaatatggatgaaaaaagtagatagaaactatccaaaacatctgtcgtcgtcctaaggcagtcccacgcattttaattaaagaatttgcaacattcaagtttctgccgaccattgacgaacggaaattgtaacggcggttgcctcaggcaactatattccgccgggttacctaacgcacaaatgtatttatgtcagaaacgcgcagaggattccgatcctcaagcgattcgttctgttatactagataggggaactgccatacaatcctgaacaacctttagccttctagtactgcagtcttgaagcccgctggccgaccgcgctccgcaggcgtaccgcctatagatagtagtacaccggaagagcgcttacataaatttactaaattgggacacgatcaagcaagagactcccatgaagggaaacccccctgtttgatcttaaacattattccagccactgaaacttatgctagacctgtgtcaagttcctctcggaagaccccaagggcgttaatcatacgattcaggcccagcctgagatactccttctcatgagcgaagacgatccggtaccagccaggcacgtcgcccccaaagtcagctcccagtgctaggaagatcctgtgcttcagcaacttctcttggagtttagtctcgagggcccttgcggcattttcagatgacacgtttgcctctgcttgctttttcaaagtggcattcacttgtcttcggataggatcaaataaatcgacccaaacaaagaagccaacattcccgcccttcttgtaagggatctggtggctttccaagaaccggatcgtgatggtatagttttccgctaggcgctggcgatttgtttgtataaaggattgcacccaggcatcgtcagagaggatacgcgaagtggccaagtctgacagagacgaagggcaagaaaaatacgagtttgcctcagcagcacggaggaagttcacattgtcctgactgatcacgcagccaagtctgataccattggagccgaagtcctataccaaagtcagtatatcccaccaaaacaacatagccgaggctcgtaccttgctcattccccaaagggcatgcacaaggcttgggtcaatcagaccgtctttcttgacagaaagaactgatgtgaaactaggcgcattgggaaagtctgggttcttccaagttgatagagcataaatctcgtcagcgatgaggtgtagattctgtttttgacaaaatcgcatataggcctcgaggacctcgcgagtgtagcaacgacctgtcgtagtggattaaaagatgtgtaaaacatccgagggtatgtactcacctaaggggttctgcgggttacatagcaaaacggccttgacgcgaatcccttggcgttgggcgtccgcaagagccttctcatagatgcccaccgtctcaggaccgaaaggatccatttcaccaaaagaaacaccaattatcttcgctcttacctagtgttagcagattcagtatgacgtttatccggatgccagccacttaccctactcggtagcccaaatcaatagggaaattaccatagtgcgggcgcgcaagcaggacgccgtcatctttgtccaggagacagaacccggaaagctcaattgcctggcccacgccagaggtgacaagaagctggttttgataactgggttgacggggttgaaatagcgagtaatgaatcgcgcaatcgtatctcgaaggcgatgggagccggaaaagccgtctccgtaagtcaaagaatggctgtcgacggtaaacttttctggcaatgagcacatgtgacgtgcgaagactgaaatcacttacattcttgttcatatgctcggttatctcatcgtgcatcagggtctgcacaggatcagtaattgatgtgctttgaactctcttaaagagaaattgcttacattctcagcaacaccaagactaacttatccgcctggattcgtatccgggtgcctcaggtcgcagacaacttccaataacgggatcttactcttcggctcagcaaacacctcgcctctagcagaaaggtttgtcttctggaatgccatggtgggtctcaaaaaaggagtgattgcggtggcagaaaaggaaatttgtgggaacgttttgatatcgaatccgactcatgccagggatctcacactgggtttcgtacatcaagtctttatagcagagcgattagacttcagtatcggatatagatggacagtctagcctatccgacgtcactacggccgattgatagccaatcctcgctattggaaggccaaaacttcctccactttcatcaatttgcaacttttgcatcgaaaggtttactacttacagagtgagtaggcctcaaaacgcggatcgggccgggtcggatgttccgcccccgaagagccgctcaagggcttattcacaggctgtttacattttgacggggccgtgcagtccagctttacacttcccgcgcaggatatgatgtaaatagccactccggacgcgtctcgctgacccccggcccccaactactgattagtagggtacgacttgcgcgtagtaatggtgagtaggtataggaaagcaaactattcgaacatctactagcgtacagggagggagcgaaaacgatgcaccaaattagaacgttaaaacgggacctgatagtaagaatgaggctagaacgaagggaatagaaacgaaacacgaataggatgtgtaccgagtcgacgcactcggatggccagacggacaaatttggaaggtcgatctctggggcttccacggaaggaagtatcctgtggcaacctgtcgttgaagcgtatagaaggaatattccctgggccacacagaatttcctagagatagtgaccccatcaatcacacgtgtctggaagcttgactgtgggtacgtgcagactccatgccttaaatatggatgggatgatgggttgccatttattccacccaatgaatagcaatatggtccatatcgacctacaatgacagtcatataccagtagaccccatagagatggacgaccaccgattggaactacagaaattgtttaacttccacacactcgtcgaacaaagagctatccattgtagagcaaagatacaatgattctccttcaaagacactccaccagacccctcttcttgccacgtgttgcagtgtagcagtgaacatctttcagatgatattctaactccaccagactgcgagtcctcgtctaagagcctggtaagtgacctcgtgagctcggcatctgcatattccttccaactgaacatttggagatcgagaccaggcatggaagccctgaccaacgacccccagacacaaaacctacacatcctcctcatccaagaaccaccactcacagcatacaatacacatgagaaccaatgcgcctggcatctctaccaatcaacttgcccagaggacatccccaagaaccgcagtttacgtaaacagaatcacctcaacgacatcacactgaccgatcaaatgcaatcatccctattacagcagttaataacatctacaaactctgttttaaacccattacttatataatcatttaataaaaaaatattattcattaataaagattaaatgtttgagctgctccagtagaagggctctcaccatacatcgccgcctatcgtcgttacatgcgctcactgcgcgcctttcatgtaatgcaagttagcttttcactgatgcgtgagggacttgtgccggtggatttgtcgtaggtctgttatttttttgggagcacacagggtatcagcagcagaagcaactgaatgcctacgtctaggactagtacccttgtgaccgctgtccaacatatgcgcatactatgaatcggtctggaacgctaccccaggcaactaatggtctcttctgccagataccacttcgagctattgacttatatggcagagcctgcagcagaaagaggatggattgacggaataagatacaaacgaagacccgtagggatcgctcgtcggacccctctggacataatatatctctgttctgcaaaataggtgtcatcatattaagcccttaattaaccgactgtgggatactctggcaattgaccggttaagattgaagacctcaacgtcttgcggaggcgtcaatttgtgggacggatcagtcgccccagcctcagaatgcaatttgctagggcgacacatgtgcatcatcaagcatcaagatgctgctggcacacatgtggtcaggcttctcttgccaatgggaacgctttgttcttgctgtactgagacagcatcagagtcttaaacaccaacacccaagcaccactctgggatctcagagaccaaggaacaaacagaccatgaagacattcacaatcatcagttgcctcgtttcgccgggctgggagccgtaagtcagcccgttgagatgactccaacttcgcttctacaacggactcgcttcttcaacacactgcttccacatagccgatgtgacctcgccgttactgacagggagaactaggtgctcggaagagacgcaatacaactcgagtttaaacctaacacgggcaatcgagtaaggggtggtagtacatatctgcagggatgacgcgaaaccactgtcagaaagcgaataggtgttgaacatgacttcataccctattgccaatcacagcagtgaccttcatttgcgggccgcatctgacccagtcacggcagggctgacgggaaacaggataaagtaaccaagcctcagtgcttcccggaataccgatttgcccgcctggacaagatagcaagcagcattgaccatctccgcgatgttgctgcccaagacaccatctgtgtggcgcagccaggaaattgcgctcactcatcctatctgggacactcctccattttcatctgcaatcagatacaatcaaacgatctgagatgggcaggaggccgcggctgacaagatgccacagttaaactatcccatccaaacaatgtgcatagacctcatcgacgccgccaggcaactgcccgcagcctgccattttggaagcaattatacatatagctacatgaccaacacgacctcggggtctgacagctatccatatctggtagcctttggcaacaactattcttttggttcgccctgattttaggacaacttgatttcgttgttgcgtccaaccacttagagtgtttccagggttgttgcgggggtagtggtgccagtgatgggatcgacaagtagcctcagaataaggtcttagtcgtttcctttccttttccataaagatggttatattaagttattttgagtgatcctgtttgcactgaacaccacgaagtctaccgcagtgaatgtttctgctctcgggcagagccacgaatatttgtgcagtatttgcatatttaacttgggaacgtgatcagtcgaatgtgcattttttttttttgccgtagttatttggcagtttctccagttctggttaaatacaatattgaccctatattatctctctctatctagtattagtaattttaaattttaataaatatctaataaaagtttttaaaaatatacaaaaactaatacttaatttatagaaaaatatattttttaaaatagtagagaatatagaaattagatattataatagttagtctttatattatgaattcactctatagactatatatctaaatctattctttgaaaccaaatcttctcgccgttcatttccggctccaagtctattcccacctcgctcactaagccctttacaccaattcgaaactccgctcgcaccctttcatgatcgcgagggtcctggtttctctccctcagcgatgccaaccagaactccccacttacatgctccattaagatcacaatcggcacctcacacgtcagtcgatccgcatcgaggccgaaaccatctatatccaccctgagctccagcctaccataccccggatgctcgtacaggcccgcatactcccaaactccgagcgtaggcggtattggtacgacaggcaacctagggtataaaaggtccttcgcatgtgcctgcttctccctccatgtggcaattctctctgaaatctgctgttgccagtccacccgatcgtgggatgggattccaagcacctgatccagtagatgcatatacagcactacctgcacgatattgctcgtcagcgtagtgttccctgccatgaccaagccccactgccgtcgtggaagatacatcattgtgcatccataaccagcaacactaccatcgtgccagatgatatcttcaccatggtagttatcccgtgtccagccaagtgcatacaaatgcgtaccggggaacatattcgtcgggtcctcagcaataatcgtacgtggttgtatgagcgctgcatgtgcatttttgctcaggggcccgctacatgttatcatacatcgaatccactgcgcatagtcgacgacactactgatcatggcaccagcgccagatccgccgatgatgtcggggcatggttcgggggtatattcgcttttgttcgcgttccaggtgtagccctgtgctaggatattgtcgccagcctgcgcatcatcacgtgtccagtaagtgctgtccatgtggaggggcgtccacacgcgttgaagcaggaatgtcccgaggttctcccccgtgagggtctcaatagcatgggagaccgctgtatacatgagattgttatacatgtattttgtgcgcagctcggctgtagctgggagatatcgcaagatgcggactgcgtctttgatgctgccgggcgatgctcccgttccaccatagtggcggatatgatcgggtatgcctgagcggtgggaaagagcgtcttcgatggtgatctgtgctgtggtgtacttgtcctcgaggacaaagtcttcgcggataatagatgctaggggtgtcctccagtggatctggtctgctgtcgtggccattctagtgctattctctccgtggtggttattgatgtcattgataaccagggacatggccgctgcggtgaacgccttagtcgtactggccatgtaaaatagggtatcaggggtcgttttggtgtcaggatactcggcgattccgtatccctgcagacgagttaagacaaatgttcagtagcagttggtaaggggcatatactttagagaaagtcctgaatccgtcaatgactgcgatggacatgcccgggacgtgccatttttttaacaggacatgaaccagcgcgtcgaattcgggggtcagaggggagtgcatcattgcgaatcaggttccgaaaagattatgcttctctcgaaggtgaaggcggggttcagtcttaggaagattaccctagggcgaataatccttgctagtgtggaatgggattcaccggaagttaaatatctccgctccaatgcttgaatattacattctcagatacaaggtatccttcaaaaggacactttgtatacaccgttctgggacctcacgttgcctgagacttgagatattacgtcttcgaccatatacctcgtacttgaatcagaggttcgccccggccaatttgccttaagactaccgctagtatttcatttttaattttgctaggtttgtatcggttattagctgatgaacttctgttaatatatatgtctttagacgtccgtattttagtgttcgcggacaaatataagaccaacgtcgaggtcgttataaggcagtcaaaagctccgagcgccacgttatatatagaaaacttaatatttctatatatatatcttatttacatatattttcttctattttagagaccctttgcatctcgctacttactctttttaataaatttattatagatatagaaatactttaaaagggtccacgactcgttcatggatcttgctccattcaccgtccctggcttgagtcttgaaggcgattgtaacgggcatgacaggtgcctttcgtagaggttgctgtgtgatgttcgtccgagcggggagtgagcattttctgacgttgtccttcgagtgtgccgggggccccgaaaaacccgcccctacggctgactaaatctagctaacggtcaaccgacgattttataccaaaagcttgggtatttatcggcaagcagtctctctccctctgatctgactgctaattgcacatcgagttcgcggttaaagctgttgacaatatcagccggaagtaggttctctagaataatagagtcatccgttttgatgactttggagattatgtcgatgtctgtatctgcagatagtcgctgaacctaaggcttgggagtatcgattatgggtagaatgagggctatttctccttgactatagtcgtgaacctatctcaatcattgaagacgaaccggaagacacccagttagttgaagctcggggggagcgatgttaccagtactgttctgatgctttaagcgtcacttaattgaccttttgcatatttacatccacttgcaggtgggatagagtatttacattgtagaacattgttcaaaagaaaaaaagaagtgggcgttttgtcacagataccataactgcttgtccattccccagtgataaggctgtgcaatgtcatcagcagtgaaagctatcaagtccaattgcccacccatcactgtagacctttaaccaatgcactatgtatctgtgttggcgcaggtaaaaacgctgctgttggtatcgttatgaatagccgtcccagacgcatataagcccaatacacataagatgagaccgatcagggcaattccaatgttcagtatggtcagcaggattttctttgggctggaaagccattggccatagttcagatgcaaccaataaatcccactcagcccataactgaaccagctcgcgaacagggcactctggagaggcgttaggtatgtttgttggaaattctgaggaaagggtgacatacaatcaagctgtttagattgctaaaaacaggaataccctctgaaatgatccaggcgacaacccaacaggtcaggccgagtgcgagccaaatactgacggacttccagctgcgactgtgtaggaggtccgatttgcggcaggcccggaaatagatatatttcagaccgatgtgaccgtttacaacacctgcgccgacgatctggatccggttagcaatattcgatgggttggattaatcagttcgtaccgttgggatggcaatgccgtaggcaacctttttcatcacaggtccggcggaggtcaaggcaggagaggcaacgtcagttccaacataataatagatgacgaccgcggcagtgagatataggcagatctcaaaagactgcaacatgagtaaggacttgttgaaatccttaggattctccatttcagcaatgagaccaaagaaggctacatgagcgcagtaggcgaagacaatattcgacactgcctggaaccctgtgtagagatttgtctctaccgtggcatgaataacccgattagggtgatcctgtacgcccacggagatcatggtaatcatgaccgcgccgaagatgctgagaaaggaagcgaacgagacccacgtcattcctttcatcgttcgcgggatagataacaccatggaaatgagcatgccgaccacgctaaagacgatggaacaggtgccgtgctcggtgattgtattcatcatgacacggaaggtcaaaatatgacttcccatgacaaaaatgcaaaagagaaattgaccgagaccgaagagctcacgcccaaaacggccgagcaaaatttctccggcatctgccagactctgaatgtgaggatagcgctggcgaaacaatccaatattgtagcctgtgtataacgcgagaaggccgagaccgatgatcaagataacacccctagttcactgtcagtcaccggatgtgcatctccctccctcgtagtacttacgggacgaaacccaacgtggccacggctgctggcagagacaacactcccaaggaaacagattcgcaaatcataactaccttctcaattagtgatagtgttcgatgcctggcgatgatacttacgcaggccgcattgcctatttactcaagttcttagcctgtgacgagccttgcagggagaggggatacataccaccatgtcaaggttttgtacttgatctcagcatcctcttcacttccgaatgcatcctggacttggccagccatgatatccctcttctcggcatctgcatcgaattcatcctctttcttgtccaccccgtgattattggggtacgctggtaagacatccatggtgtgtactctaagcgacctggacgaaagacaatgggatcaggggagagcgttgtaagagactagtatatatataatccgtatacgagtgagatccaagtgtgaggaatgtgaggaaagtgtgggaaggagtaggagaagaaaggcgggtaagacgggggtaccgttcccatcagacggtggatcctggggtatttgaagcaatcttgactaaaaccgcagtagctcatcgccagtgcggagtagtatgattattcccgcattttgctgttcttgttacataattgcacagcaattctacggaagacgctgataatatgtgggtcaactcgctccacaccccgccacgattatgggcccatgagacattggaaaagacgttctccatattttcctatcgtttgccgcccttgtcgcgtggagactacgttgcttcccagacgtactccaccgtcgacacagaggtgcggtggtatggcctgatatatgtcgtccagtatgtttccaagatgactgcaatagatcttgtggtatttaaggtttgcaggcatgctattaaacctcgcactaaggaaaaaattggctctgggtaggaggcgaggattggctgggtgggttctagcctcgaatagacttttttgagaccattctagaaggacgagaaggaggaacggttgcacccttcaatcctcctgcccacatctaaattaggttactagcctagaagatcctgtgccaagttgatctcacttgctgaatcctccccagtatagtttatcatattaattctcatcttacccgctatatgcgacggccaacggacgccgatgtaacctcttggcccaaacacttgtgagacctttctccaaacaacacatcaaatatccagtcacctgtttagggagacgtgacacgcagccgaccaaacccgctttccaagcaccatgatagcactcaccaggtgcctgcttcggtgagcaagtataacataacggggatcatgaacgccgcgtttgactccacccgcagcgagtatcctattggcagtggttatcagttcctggtctagtgcccaaacccggtaccgaaccttcgctgtgatcccgcagatcggacggaacacgcggcaaccttgtggcgatgtcggcttgctatcttatcggcacgaaagaattcttccaggtgggaagttataagttatagtcgggcctaactcggcctttattatcgcctgtactatacctccgagtatagaagaagataaccatatcttaggcaaccttgtatttggatttcggaacgcgcgagtcctattggcgaactaccgttgccgaggcacgcgtgcagatttctcccagtcgccacctcgacgtgcaaaggcagagacagaagtggccttgatccctcacggagagcccgaaggccatattgataagagatatgtgtggagccagcggtagcgaataaagggtattagaaaagactcatgcagttgagcgaattgaaggcagataagaaccaattcaggcagccagatacgtctgttcgaaaattaatggagtaaacacaattcaagttacagtatcagtgcgacgaacccaatgcatatcggatttagatagtaagccgcattttcccgctcgatctaagtaagctacgcctaccagaatgttgagccccatatctgctggcatatctgccaagacttagaccacccatccaggacagtcgcgccaattagaaacgcaaatctatcgcgaactagtcggtagaaccaatagcttctctgggcgtcagccacctagtcatccagaggctcagctaaagccaagttcaagacaccaatactaagtctactttgcgaggggcgtttatccgaatgaaaacggtgttgtatggcgccgacagtcaaacagactatcttagcttctacttgtatcctttgattacagagcgacatacatcaatatatcgagacacttgatatatgattactatctcaaccgtagggtcatgccatgaaagcagaaaaagtaagtcaaagtccatatgaacatccttagtacacatcacaatccctccggcatctcaaaatcattcccgaggagaccagtaaagtgtgtgttatacatcccaatactctcaaggcccattaccactcacaaaaccttataggcatgcccaatgcgaaagcaacagacgccagggctagaagctgccggccgaaaagagctgattgtccggacttccccattctcgaaagaaatatcgtgccaaacgttctaccctacagcagcttgtctgctacctgttggagtgcgaccatcgcacaagcctcatcgaaatccccactgggcgcaccaccaacaccgacagcgccgattgtctcatttccgactttgattggcacgccaccagcgagaattaggaaatcatcaacggcggcaagttgggcagcgccaggattttgaatgttcttgaccatagtactggtcgcggtacgcgacgatgcagctgtatacgccttccggcgcgccgcctcgggggtgtggatagctgcattgtcagcccgaaggagcgcgcgcagaacgccctcacggtcaactacagcagccgatacgctgtattgcttcttggcgcagtcctgaactgcatcctgggcgatttcgagggcgagactgagtggaacattctgttcttgaaggagtttcgtggatgtagcggttgagaaggccgccgccatgcagccaaagatcatccagagtttggtcatcatttttgcttttcttcttggagctgctcgtagggtactccgattggtgaactcaggatgatgatagacgcaaagtatctttcaattaatgtgttatgtaggattgtcgggcagtgagaaggacacttaagtagaatttccagcacagacaacccctcaatcggagaactaccaaggcgctgccccgagacaagagcagggactctccgtgatactgaagactacaggttgctaatgacccacggaattcaatgctgcgcctccatgaaagggaagggctcagggtccagaagacggtgatctcccgcgcgccacgctgccaagctacatgtacaaattggctaccacgaccatctgtcctgttacatttcgctaaattccgaatgctgcctgcatttgctatatggggtaagggtgccaagtgtgggggagtggaaatggagttgtggctgagcttgtcaagtcagcggcggcaaagcaattcaattgtgctttaggcagcgaaattctgaaccggcttttggggcttgcaaagcattatatctcaccatccggcacctaccgagcggcgcatagcgccgaacgccgcatggatgcactgacatgacagtggtttgctgtaacactttccagagcagtcttgagatgcttacaatctgcttggaaatctagacctcggtatatcaaatccgtccgccaccgtgacacgtgaggcccaactttcctttcggtggtttaggttggacctcggcttggactgttgtggacagagaagaacggtgtgagatatgaagtgacgttacaatgaatgacttctttggaacagttcactcttgtcatactgagattaacaatacatctggagccggtctaacactatgcatgcccagatatctagcgatacctgatgtcaactatcggcatgaagtcctggtatttttgtgctgaagtaaagccacggacactagtttgcgagtcgagctgtagtccctgtactcttatactgtagagttggaacacagatggctaatgaagcacagtgtcaacgggaaacctgcgtgaagtctagcttccatcgaggaatacgctcaagatgctatatgaactctacaacgccccgcaggcctggtctaaagtaattcacacacttgtgtcgattaaagaagtttggcagcgcgtcttcaacgtctacagagaactccttcggtttctgtggggtagggcgatagacgcagtcattcgtccgaatatataggctcccaggtgattggtcgtttcaattcacacctaactattattatcaggttttcagaggctcgctttcttcccttcacacagcaactaaacctgttcaatccctgcgatcgcaccaggatacatcgctcgaatcacctcatctctatcggtggcgtgtcggcaggacgagggtgaggcagttcgcttcgtcgccagcggcgttcaagtgcgtctgctttgtctaagccgcagttgtgtagaggattgcaaaagacgaagatctcagggctatgttcttggtggaaatttccgctaaaagtgaggaggagcaggagcaagagaagattaaaggaacaaaggtggcgtatgtgctatgcaaccctctcttcgaaacagggttgtattatcgcatggtgtatacgaagttcccgagagatattcatttctagtataaacgtttttaaaagtctcggctccaggtaagatatatatttctcaagccaccggtagggatcattattttaaaattaccctaccttcgaggtccccaagggatttaacattttccaagttccaaagaattctataaagtaactcaagagagttttctttaagcttcttgctttcttttttttttttttttttttttttttttttttttttttttttggtttgtcggtcgtcttaacaaatattattcaggaaatacaatggcctacctctatattagccgaagcataaaacaaaccagtacatacgaccatagggtgtggaaaacagggcttcccgtccgctcagccgtacttaagccacacgccgggaggttagtagttgggtgggtgaccaccagcgaatccctcctgttgtatgtttcctttttgctgtttccaaaatgttctttactgatggggtaatgcgtatttgacctcttggcggtcgctttggagtctctttcacgacatgtaatttttctgtctatcaagtaagtaatcagtgctagttcaattataccatacagtggctatcaatgatgttatggttaccaaacaatgtcctgtttcatttcaatatataatcaaatctggaagcaatgtgagcggaactgacaaaacataatctttaatacggggctccctaatagcgaactttctttgctgatttgtaagtctatcaaatactacattttcactggctgaaggaccgaacttccgggacagcaacgttggtcttcaatatagagcccttatacatcattgataatcggaaagatccgaagttttgaagcatttctttgtatagataacatataacaattaacgccacgttcctatagcgttggcagaagtagtttttagacagttggttcgatattcgtcaaggctatcaagaatatatatatatccttcattgctagagtagcttcacacttgaaagaatcatatagtaggtgcctgtataggcgaagatatcaagcaaacatccagtacatatagagagaaaaagaaaaagatagacttgtacgagaagtcattttttgatagaatagtctatctataaataggtgaggcaccccttttctccccaagcgcggtcattgggagcttagaaagaaatgatataattggagtgattcagaaataagatctagtcatctagaggtgaagatctgaagcatattgactgaagatgggcggaaaaattgtgctatcttgaatcaggaataaatgactggttgacaaagacgtaggtggtttagggaaggggagttactctcgataatcgtcggaagaacaaaaagcctggctaactcactgactatgcctcgtaagtactgagtggtcattaatagagatagagctaagcccggagattttttcgtattgcgtctcattctgaagcggtccaaaagcacatcgtatgccaaatgtcaatgcgtgccaattatttcgcctaaactagtggaggaacagctaatcgtcttttaacgctcgtgcgactcagggcgaggggaagagagggtgtcgactagacaaggtgaggaggtgagagaaagcgagattatagacgcctgctgcacatagcagcatcggaatcatgagcgaatccccccgtgctactctgacagagggggtaggaatcgttacagcatatcacggatcaacggtcaacgcgacctctctaggtaggaggcaagcacgaaccacgaagttacaaatgatgttaggaagcatgaacccaactgagcatcataccccaaaccccttccagaatataacagggtgcgagatgctgcgaagtctgcgcgaaattggcgcggacttggcacggaatgctaggaccccgcatctctaccttccatctattctttttctggggaaacctggagtcaaactatgagtgtaattagcaataattagcttccctgaggcttgtaggaggaggatttgagtccacaaattctgccccaacttgcaacaataacaatgctcggtgcattctcgtttcgctcgcccttcttggtttgctaagagaagatgtcgaatggcaggtgagctgttctgatccaactgacatcaacacgaggcttttgatcatcttattcataattccgtggacccgaaacaaaaacaaatcttaatagtgggagaatagtttgacaaaatctgcacgaggttttcccgagagcataaaaaagtggtgccgtttgggaggaagacggactatcttcggcatagtttagctatacgcaactgcccccctcactgactcttgggcttcctagcagctgacacagtcaattccactatgaatggttgatttataacggagcttgatttattctacgctcctctcataaatttgcggagattcgctataaaacacggcatcagtttggaaacacgcctctactcacgcaacacatcgcgaaagaaaatggcgccttacaatacgaacgacaacagcgcgatccggtccgacggagcagaagagtctccagtaataggcggaatagcaatcaacgcccggcgcaactgttcagctcgaccgtcggatcatgcagtcgatacggaattcctcattgtcggggcaggtcctgccggggcggccttggcttgctttcttggttctcatggtatgttttactgcattggtatgacactagctccttggtactaacgctatgaagggctgaagggcatcatgatcagcagcgctccaggaacagcgaacacaccccgcgctcatattactaatatggcggcactgggtcagtaatctgccaaggtagcaaataatgatctgttattgatacatggatttgcccatgcagagtgtctacgggatattggtttatatgacgaactggaaaagctgggatccacgggggcagatcatatgcaacacacacgatggtgccatagtatggcaggtgaggagtacgcacgcacccactcctggggaaatgaccctagaagaaaggtgagatcagttggtcctttcttattctgtcaaggaggtagattgacgcagggcatagggggattatgaactagctagcccatgtgaaccatttgatctgccgcagacgatcttggaaccagttctggttcggcatgcagctttgaaaggcttcaaatgtcgttttgatttcacgctcgtttctctctttagcgactcgaagaccggcttgatcactgccagtattcacgataagatgacagacaaggaataccaaatccaaacacgatatctttttggggctgacggtgccaggagtgaggtggtgaaacaacttaacttgcctctggtggttcagcctggtcaaggtatggcaatcaacgtgctggtcaaggccgacctctcccatttagttaaaaaccgaacgggcaatcttcattgggttatgcaaccagatcgagagcacccagattttggctggatgggaatcgttcgtatggtgaagccatggaatgagtggatgttcattctattcccagatcgtaactatgaccgttctcaaggcaagccgtctaaagatgcgtatcaaaagagagtccaggagtttattggcgatgatacacctgcagagatcttggacatctccacgtggtatatcaatgagatcgtcgcagagaaatattcagagggtaacatgtgagtgttggctttgtcagtctgatgatcgtaatgactctaacaacgacgttttattcctagattctgtcttggtgatgccgtgcaccgtcaccctccattaaacgggcttggatcgaacacatgcatccaagacgccttcaacctcgcctggaaggtcgcatatgttcacaaggggctggcgtcaccgtctcttctatccacatactccattgagagacagcctgtgggtcattcgattattaccagagcaaatcaggcataccgcgaccactttctcgtctggaaggcactgggcatgttgcccacggacttgtccgcacggaaggagattttggaggagttgaagagtgcgacaccagaaggatcaaaccgccgccgtgctctgcatgcggcaatcaagcatacttctcatgaattccacggattgggagttgaaatgaatcaacattacgacggccaaggtgtctacacagctgatgagcccaacccctatgcgccatccagacgggcggctgaagatagcatcttgtttcatgaaccaaacacttatcccggatctcgattgcctcatgtgtggctcaacaaagcaatcccaggagagcctgtttcgacagtcgacattgctggccatggctcttttgtcctcttgagtggaatcgggggtgggcgatggaagaaagcagctgaaaatgttgccgaaacgcttaaggttccaatacaggtgcattatattgggttccgacaggattgggaggacgtttactttgagtgggagaacctgcgaggcgtggaggaatctggagccgtgttggtgcggcccgatcgattcgtagcgtggagagcacctgaagtcctcaaggatactgaagcatgcgaatcgaagcttctgacagttatgagatccattctaggattccttgatgtatagcactcataatgccccgtttctgccggtcctggtccggctgaaatatgatggataggcgaagccatagctgttacatggaccaactcttcggctcctctttgaaaatcttataggcaaagaatatactgacaaggggggttatcaatggcagcctgagccgtaagaatgaataaaaagggagtataatacgctgcgtacaaaaacttgcgttgcagcatctgattgagatattcattaattaagctattggccagaaataatatacctatatattcgccaagcattccatgtgcttctctagtcagaagctgaatattgtttcacattatattcttcctgggtaagtttgcgcaaaacgaatccacgcgagagatattcctcgaggagcaagatatcactcatgtaaaatgatgtgcaatgacaggagctttttggtaaacaacttcattggagggctcggctatctacgaaggctgctactatcactactcctgcgcgtctaggtaggcgaaggcacatgctcttatttgttggataatcacgaacaccatccctcactacttgctactcttactcatagtagacttcgttgatcaaagtcccgattttctcaatttccactctcatatcatcgccgtgtttcaggacgatcttggggttacgcatagcgccgattccaggacctgttccggtcatgataatggtgcccttttctagagtggtcccctgagagagaaacgcaatagtttttgcaatatcgaagatcatttcccttaagggtgaaaatgtcagctaccttggagagttgacatggtggcaacaatcgatccttaagatagactaacctagtgtttgagtcttgcaccacattgccattatggatagctctaatttgcagattatgcggggtgccgatggcggagggagacacaaggacggggcccagtggacaagatccgtcaaggcctttccatcaaattgagtcagctctgggtaaatgacagaactaatggacttggaagataatgaggcaaccagtctgtctcaccttttgaaaaggaccactggctgttcttgaactgctgtgttcgagcactaacatcattgctgcaggtatatcccaacacatactccatggcctctgactcgggaatatctcgaccagtcttagacaaaataatcgatagctctgcctcgtagtcgctggagccatcctgtgcaatcttgggcacgtttatctttgcaggatggggtccgttgagtgccgtgcgcggtttgataaagacgaccggtacatccggaatgggcatattcgcctctttggcatggtcgcgatagttgagtcccatgcaccggataatgggcacttcttcaattccaatgggagccagaagctgtttttgaatcggagtagttagttccgaatatgtgattccaggtgttcacgattgcggaatacataccctggcaatgtgcatagttgtgtctgttaccctgccatcgaagatcgaccctttgatcaacttgaccgcaactctctcgccgttaagtattgcgatcccaacatctggatacttgtttggatcgacttcgccaaggtgggtttggccatcttcttcgccgatgaatctcacgaggtgtgcccaattaggacccatgtttgcaaacttttgggatcagatattattctgtaagcctagacagtagtcaaggattattcctcacaagagtgcgattgtccagcgtgagccatggtggcctttttgaactccccacgtcagaccttaagtgggactaattgatgccgatggcccccccactgcacgattgaattcattacaaagacacatggaactatttcggtctattttcgctcagaactttaactactatgagccgagtttgggttgctgggagggtaggggaagaagttgaccgcaaatgcattcgggcggaccatcttcggtgcaattttcagtcaaacgagaaagtgaactcaagacctcaagactggcggcgtggaatacgactggcaccatccttgcagcttgacgggggtagtggaagttagccattgcgattaagactcgccataaactgattcagcatgaataatactcagaaggtatccaggcctgttgcccggatcttcttagtgcgaatacaggcaaatttgtactatcgctgggagggctctaaataacacgggctgcaaaaaggcactgcgacgctcccatctcttgccaatccggatgtaccctaacaagccaatttagttctgcggtaacacattccctaacctatatgggctagatggcttttttatggattaatgctgctagcgcttctatcccgatcttttgtctagtgttggcctatattaaagtgcaacatacaaaatgccttccgataatctaactgcaatagtagattacaaattagagtcatttgcccgagaatttctcgttcaatattgatggtgaaaacggctcaaacgaagtctaagcgtggctgtctaacagacatatcatataaatatgcacgaagagaatgttactcctttactgtagtagaggcaagatattaagcgacgtaccaatcttcaccttccttaagacgatggaaaaggacctaaaattgttgctactgcaggaaggtaggaggaaggtcgggacctagtgacacattagaagaatggaactatattgcatcatgcccaaaggcctaccccaaacgtgcaaattatccggtgtagcaagggatcgattcgtttggtgttggtcatttactaaatcaccatccacgtaatgctcgatgatgaaacgagaggtgtcaaacctttttgatcaaatgtgtgttagaattgaccttcgagagagtggtattaggaggcataccaataatcgaagatctgactgcccatgatatgacgtccaacgccccagcagttttcataccccttgctacggagccagtcgtgacccagcacttgtgtgtcgaaatcatgcgtttcgaatgatgagtggtgaacgtgcgacctaggtccctcgaagaagaaaaagcaatggtgatcgaccaactcagaaccgcggtccagatggagaaaggtggttatatctcttccggtagaatcgtggatcagctgaaccatgtggtaaaggctcttggtcagtatacgccgagcctcgtgaagagccaaaccgcggagcaactaacatcgcttgccttgaagttgaatcgtgtagtatagaattcaaacgcctgcgcaaaattggtgacacacattccgaaatgacctaatttgtgcacgggtgcagggccttttggttttcaaaggttcagtaaaggttgctagggatgaggttactaggttatgtcccttaccctttttgaatcgttgtgttttgttccctggccggtgtttgtctgttggctgggaaggtcagaaggtttccgatgagtgagttatatgtatatatatatgagaataactgacaaaattgtaatcaagttgtggaagcaccttctcatcggcatgggcctcttgtccataaacaagatgaaatggaaacttgtcgatggggtcatggaaagtgacgcagcggccaccacctggcgcatttcctaagtcgtagatgcctgtggccccaggtaactttgtcgcagcaaaaagatcagattcggattccacgacaaaggctgcgcctccaaacccatcttggtcgccttgtcgcgcacagtacacaaatggctctgaactggtgccacggtaatagatatcattgcccacgcgcttgacttcccggaatccgaaatccagtaggaagtgatgggctttgtcgatttctctatgggtgtagaagacatgcgcaatgcgagtgaggttaatgcgagattcattacttgaggctgtcattttcgcgacttgtcttgggcaaagattagaatactacttagcggtagattgttgttccagatggagactcttcaagtgatatttcccttctctaaataccccggccttgccccacacaaagtccgaaggtctggtgtgatcttgcttttagcggtttggtagtggtcgaacgaggttcacggactcgagcgaaattgtcccgatcccgcacggactatcttcggtctgttgcttagagcagaagaggaacgagcaagcaggggcttttcatactttataggggaccggtttctcgctgtacttctggtcttgggacattggcatacgaactagagataggtcatcctttgtcttcgctggctgggagtgggatacctcactccgtattttgctatagactatctccattccaatgcgcgcctaggcggtatttgagacattacatgccttacgtggagcggagtctacagaaaatccatcgacggtaaattcgtgctatggccaggtcccatgggggaaccaggtagattacagagggctgtgtctctagcaacagcaatatatggatgtgggagaaggagaggattgcaataccgcatcacaagctggccaggcctgctgctttgtcaggagggatggagtggccaaatgtggaagaatggtgggaggataaatccatcccacaattgcaagagtgcacggaaatgtagttcatcctgaaagtaaatcatatattccaccaggaaaatcaaaagtgggccaatccaaggcctggtcgagctgatatattgtatcaaggaaatgagaatttgggggcaccatgtattcctctggaacctggtttctactcagttgtggaggagtcatatagtccagcattgccaggctatctcctacgtacaggtgtttttgcgcatggttttgggctgtaatgtctaatctgacatcaatcggggttgaactggtgagcgggacactgggtgtttcgggtatatattgagaggcttgtcgggctgtccggtcaaaattcaggccgcgctctacgttgtgaccgtcttggtccgaggcagactggttgatcataccggtgtcttccgatgtctgatttgacgcttcgtgcgaggttggacaagctcgaacctccagtttcttattcctggcgtccagttgctcctcgatcaactccaggttcttctggagagcggtttgaatatcccaaaattgaacgcatcgcttgtaggtcagataaagaacgtcgaagcgcgactttactagatctcgattggactgtgctcgagcaaagtgtttgcggaccagttgcaccgccgaggcaagccagatggtactaggtagaaatggattaatatgctgaaaatgatcctcgcaactccgattcactattcctagaatacgatctgctgcctcgtaatactgtcgacgcgcttcattttctgtctcgagcagaccaaaagtattccgacccgccgagtctccggaaggatgacggccactggtttcagttggacgattttgagatctgaatgcgtcatatctgtagatcatcaagcgagttaattgagtcataacgaagatattgtagatagagcagtgctgccgtcgctgagattctaactccccttgtactggcgccccaaaggccagatattgatcacgatactggagatggctgggtaaagcccaagtaaagcagcgtacggcgtttgccaatgtctccagtttttgacgcgcctccatggccgagtctgctgtggaaatctggctatttggcatttgttggtgatagccctgattacttatggcaggcactcctagtgggtcacaggcgatctgggcattcttcatgagagaattaatcacgaggaaccacgctttcgaggactgattaccactgtcctgcaaggccttccaacgtttgtttatgtccgtctccataaagcaacttgaagccgggtggcccgagaaccagtgagcgttatcaactggaagccatatttccatttggttccagttaatggtcgtgggcgtccgccggatagtactggcaaaaacatccatttcccagatggcccaaaaagcacgacgtttttcttcgtcttgttgccagtggtggggatcctccgtttggataaccttcctggaatcaagaagatgcaggtttgtttcgtatatcaaactgacacacaatcccagcgatctccacgcctttccgcggaccccctgggtcagtcgacaatgcgtggcaagaatgagagcctgtatgacgcaaagtggcggcatctcatcgtcacattccgcgagcgcctcatttatgtacttgaacgcaaggtcaatgaagtacgcaggctgtcggtgactctttgctgcgagctgaactgcgtcgctagctccgtcgttggtccttagggccccaaagcgtgtggcatacccagctatggccgccagcagggcagtcaattgacaaaacgaagggatattcgaaagcttttcggcaaacgaaggctcatgaaagatatcaatagcgaccatgttgtcgaagaaaactcggatgctgttggtgccattagcttgtctatgttccacttcaacaactctttaggcagccgaggtcattacattttattcatggaagcttgcgagacacctagctcggtgcaggcttgacggcaaagatctgtctgttgaccgcccggggagctcgggctctgcttttgggagggagtcgtgacctcgtgtgatggatgtaaaatgaaagcgagatcaagcgtattcaactgagaggttcgctgttgcgagcttccccgcgcctcaatcccagttgtctcagtaatatcggcggggacggcgaggaccaactcttctttctccagctgatcattcaatgcgtcgaaagaactatcccgccggccattttcggggccgggtggcggcctcgaatgcgagttcatcggtcgtctctgggctgtctcattctgtcgtaggcgttttctcttcttctgcgacgaccctagaccttgtcaatgtgcctcccccttgtcgccgcttatggcaccgtgtggtcgttccataccgattttaggcccgggtttcattgaccccagcggataattgcatgtctggcgtgtttgttcacagaccatacaccgtggcaatgtccggtcgctgacagctgttacttcacacgccccttggaaaagccttggctcgagttttcacgtaccatttgaccttacgcctggtcatcagcacatgagccccgttctgtcctagtcttgagaacacggagtaacacttacttgcgacatgattgacaggccaagtcagataacgacattcttgcgaaaggctttctatgctgtgcccacattcacctctatcgcgacgggattgaggtacgaaaggagtcttctgtattatggcttttgtgacacaggataataggtgctggttcgcatcgtagtccaccacctcgacgacccgttgcaaaatcggtacagacgaaatctaagagaactactggcacagcagccccgtggggatgttccccacacgcggtcaggtgtgtcacgagactcccaaaatcacaccgaagatcgtccgagagtgacgtcattggtggccgattgggtcgatcaattttacgttggttcaggtccattgctactgcgtctgatgttctagacaacaagttggtcaaattgacatactccttcatgcctatgaaataatggcaaggaatgcattcacaaggccccggcttggcgtggaaatcaaccttgacaagccaggtgcaaaggcctagcagaaagcccggattctctgaatacaacaagctaaaaactttgacaaactgtccttagtctggtaggctagcaacggtcacatgtgaagtatatcacgattccaatcgaaaaccacagaacggccatcccccccaagttctcacggtattatcaacattaggaaacagtatccaactctattcggatatcagaaagccagtacccacgatcacgccgatggaccggaaatcagcatagtattcacgaaagtgcgaaaagtaacacaatgccaacaatcacgagcccgaacacgaccaaagagaggtttcctcccccaccttgtttccgcgggggaggaaccccccccggtgacgaggggtcatatggaaaggcaaaggtactgtaattctgggcctctgggtctgagctggggttggcaggtggaggcaatgttgtgggtggcccagcgtccgttggtgagtcgtggtgcttctagaatggtcaatccatgttgaaatcgctcgactgataatggatcagaatgtgtgtattcagcaaagggaagacctacggtgctagaagacaaaggggtcgccatgatgcgtttatgggttgatgtttgttaatgggatagtgggttccttcatgaattagtagttggtttagggcggggcatccacgtggctgatggttcatcacctgagaagcacatcgactgtatccgagtcaagatctacaaagccaagaacgcttctcgcctgatgacccggtacacctgacgctggatgcagggtgacgtttccctaaccaaccttaaccaggtatggcttttcccatttgctcctgccttatatggtggatatttatgacctctgagaagtatagtaggcaggacatctacctactccagggcattgtctcctgctcttgtgatatcttcgtaatctgcataataggatagcatctaagggtgagattttcggtacttccatcatttatcgcgctaatgatctagaggaactactacacgagcaggtgttgtcatcagccgtctagtgcaaaatgtatggaacgatcggactgctggcggctataatcgtttctgtgtgcttcacaggcgtccataacgtaggttacagaatcttcgtttttcgttcgccatcactcttacaaaccaggatactacatgtagttctcggggtagccacctgcgacaagagggagaaaggatactacccctcccctttttaaaagtttggctaacatgcgcgctagggagcagatataaccagcagtcattgattcgggaatctacttataccgcggtaaaccaccaacaacgtgcaatgggtatatatgtctattcaaaccagcccaggacctaccaggccgtatgacccccatcaaccaccacagtgctgccagtcatgaagctcgaagcatcgctcataagtaacaaagtgatgcctctaaactcctccggccttgctaacctcttcatcatgttttcggactcccaaagcgcccgtgtatctggatccttctccatcaccatctttgccatcggtgtttcaatatgcccgggacaaagacagtttacacggattccccctgtgccatcttctttggcttcagaccactccatggccagactacgcgtcaactggatgactgccgcttttgacgaattatagatagcagacgccatgcccttgttggcaacgatgccgctcatacttgccacgaggagaatcgagccgtggcatttccggtctagcattaccttcgcggctgaaaccgcactgcgaaagacgcccgtgtagttgatgtggatgacgtcgtcaacgttcttgggtcggtggtcaattgcgctagcgacgtggtttatacccgcggctgcaatcaggccgtcgagacggttctgctgcgctccaatgtcggcgatgacagcttcggtgtttgcatcgtccgtcacgtccatgcagcggtagtgtagtgagcccccgaagtccgggttggcgcgtgcttcggccgcgcggaattccccgtctggttcaggtagtctgtccaggcagtagactggaaaaggtcagtcatagtccaagaaatggcaatcacgagatcacaccttgtccacccgcttcgaccaaggcctcggccatagacaaccccagcccccgtgctccgcccgtcacagcaaaaaccttgcctgccagcgagaactcccggaatcgctcacggctcttctcagtgcttggcagtttttccttcagatgcgcctgaccagccagagaccgctttgctgtacatgttgcgcagttgaccggtggtctaacggcattccatctcaagctcgtggtagcgggagcactacgccgtgcgtataaacgggctatgccaagacgtcgcgacagcattttaactcctctcaatcaactaactagtcccacgtaacccaatataatcgatccttcccccggacaatagagagtagatatcttcgcttgcagaaactagaccaagatacatcaaatagctgtgtttggcggagggaaaccgccagtctacgctgggaaagccagggagctttaaatcgatgcaccagggaagttaacgactcgccattaggtagtagatttggcctggtggctctcacttccaagttttaggtaggccaataagctccaggttgtgacataggaaggtagtcaagatgatgcaaatcggtctgtgacaggtctgagggcataatgtttatttgaagtagttcaccattcgctacggcacagtgaacatgcgaagcagccagctataagttatctctagccagtggcatcaagtttacatccaccttgttcgtcttgacgggtcgatgacgtcatcgctcggtggctcaaattagggctttccatcgatggtgtgtcgatctctcgtgtaggttaagagaaagagtaccattggcggggatctagagagttttccaagaatgtggttctttagctcgaaatagaaacttgaaacactagctgagctagcagcacagacagatcttcaggcctagcagcattttcccgcagaaaaagaacccactcggcttagagatgatcaagctcgctgccggacactcagccagtgagcaaggaacggctgagctatcttcttctcacccatcacgacaacagagataatggattcctttgtgggcaagggatacaagaatgtatacaaggcattttcgacaatgaccaaatacctccacagaaggcgggattgagggttcgatggatctaagggcatgcagagcgtcagtctctgctaaaaatatgggaggtggtctcgatattgctatcttatctcatgactcttggcagggatagttaaatgtccgctggaacaagccctatccagccctaggatgtggcacataatccgaccacagcctagctaaagtggaacgtgatactccaatacttaaacgagagagaacaaacagcgattgaaatcggtcgtcggatgtaggatacgatagctttctgattctacgaaacacgactgggactcagataaagtatgcacgaagacatgaacggattgatggaatttgtttctcagatgcgatatatcgctaccggccaagaaaagccaagcgatggaatacgaggccatgactcacattgtagttatttatatacccggcctgttgggtgttgtgcaggaggagctttaaaatacagctatctcccttggctcaggcaagacgacaccatggaacaaacaggcatagaaggtcaggctttggcagcctgggagaaccatgctagatcctgggattcgactatgggtgatgacgggaacgactacttctcagtcctcgaattgcctgccctgaaaagaatgatcagtggacagaagcggaatcgagccttggacctcgcaacgggaaatggcttggttgcgcgatggcttgctgaagaaggattctctgtggtggcaacggacggcgcaagagccatgctagagcatgcaaaggcgcgaacaactctctggtatgaggaaggaaggttagacaaggagcgaaagatctcatttgaacttcttgatgtgaccaacaaggatcattgggcgcaatttactagcagtgataaccttctggttcgttgttgttttagcaattgaaacaccttccgctataggcgagctgaaggatgacagtcgaactaacacattccagaaagacggatttgacgtggttgtgatgaacatgggaattatggacgtccatgaccttgagccattagcagcatccttaacgtcccttctgaagcaagacggatggttggccctacttctattcgagctatctaaataatacttgaagccctggacttctgacatgtctaccttctacagtttcgttgccactgtgcttcaccctctattcttcacgagcggtgcaaggcgccaaatcacagtccatgaggatcccgcgactggccaacgcataatagatcggtccatcctcttgagtcaatatcagaatgttgccccggcccggcaactcttattttccaatgatagcgagcataagccaccggtacacctctgccagccccaagtctgcagatcgaagaactaatgatagactggtagctctcattccacaggtccttccaagatctgtttgccccattctttcgggcaggcctcatccttgatgctctggaggaggtgaacttcgatgataccttctgtgagccctcgcgtgaatacgccgctagaaatttcaccgaattcccaaagatactcgcttttagactgagattggggcctatgcataggagttagacctcgtgaatggattccaaacgttgttcaggtaggtgatctgttccggcagcataaccctccaggactttttgatggtcggttaggccatctttgcaataacgattagagataccagtctatgatatgcatatgttaaagatggcgctgatctgtgtttccattttagtcccagtgactgttatacaagccaaatcatccagccggcggcctccattcataaaaggagtatttcattttccagattggcctgacagctatgtattgctagtaatattaaaagaacggacaacccacaagaggatgttatttgtcacagattttttagtgctagcaatcgattattcatttgcgactttctagccctttgagaacggtaaaccatgtataagctacaaagtgttccaaaagcggaaacgttgtgctcaatcggtttctagcatgcgagatgatctgatggttaacctagagatgctttggcctggtctccttcatactgagaatttatattcaaggtatttctatttcgttattcttggtcaaagaatcatatcctcgcattcgcgacagagattcaaccttcctgaatgtcatcaagcgcatataattgattgcgccaatctcaaatttgttgacaaattggagttatatcctcggtgcattctctgaaagggcatctatgcatgtatctcttaaacctcgatccatttcaggaatgctgggctttcgtagccttccacaactttcgaaatcggggtcaggtatgcgtcggagtcattctgatcttgttgcagatgacgaacataagcttgggcgactttcagccacaacgccttctcgcgttcactggcacccgatccttgccaaacccagagtcggctaccaacgtcgtagaggaatacatcgtttccgtccaggtccgaccgacgaactggtgcaccatccttggcaagattgaatgagggcgtccccgaggcgtcgctcagccggaataacttggatgggcgcgaggcgccgctctcatcatgggatcgcttggagaatgacacaggacgtggagcctggaaagacagctggtccacctccttgccgcctaacaggtcgacgaagatctttgaccgcgactccagttgagataaaacctccacatcgacgtgtttcgccagcgtcatgtcgttcacaacttgagcggccttggccttttccatggggctgcaggtcttcccctgccaaacccagatcttgtcgcccttgtccaagacaaagacatctttgtcgtcgaggctctgccaagtaggttccacctcgtagacaatgatcgagtcaatccggccggcgcctgggtgcttgaaaacacgaagcaaagtcgtcacctccttgggttcctcttcctccacgtggttaaatcctgaagccacaccaccggaccggatggtgatgcgacggaacagagacacgaaatcctccgatggctgttgctgaatttcacgatgctgggtagccgctccgtgcaggaattcatccagctcaacggtcttgtacgccgcagtgcccgcctcgtcttgggttgttttgctgccgagccagaaaaagatatcgtggcccaatttttcatcgccgactttgtaggagtgcagcacgatgtaactgtccccgtcgtagaactcgccggcccggttcttgggccagggcaccacttcgaagttctcaatccgccagatccacagcccggcctcctgtccgatctgaccgttgttccaggccggctccgtggctgccgaattatacttgacgcggtggtcaagatcggatccgatcagctccacattgctgtccttgatgtcatattccttggggtgcactagtccttcgtgaggtgccatggtgagttagtgagttggttagttggtcgtggttctgtttatctctcaagttttgttggcgggaaatctggcttatgacgcacgcaagtgggtccagtggctgacccgatagcggggtaataaaaagaagaagaatgagggagagactcgaggtaggaggggtcatacagatccaagcctttgagctttggtgcagttgggcttaggtcctgggtacctgggtagtctttgtatctttctggccatatcgcacagggtgtgaccatcacaaagccctttcagtatagtcacgtgatacgaccaacaacgatctgatatcaaatgacttgatcatgattcattataactggtatttgtgtggtaaatggtctttacgagctgctccggatattcctctcatctaggggttgcgtagtcgtgacaaatttcacgccacaaggctcacttgtgggaacgagcaatatatattttcagagctgacagaccagacctggatagttcacaatatccttccagacctgactacatagaaccagaaatcctcggacaccttattctgtaactattcgacacgagtcaatactatgcattcatctcgatcacatatttagtatcatattcaggccaaatgcaaaaagaataaagttaagatgactttctgacttcctgggcaaccacatcctccagtgtctgcactggcggctcgccgattaacgcgttgtctcgttgatcgtataaggtgcctccttcggtccagatgcgtctgagtgtcaataccgtggcttcgggcttgcccgcctgccaggcctcggactctgcctcacgcaactgggacagcggggtgtactggacattggtccacggttgaccccctgtctgacgcacgaactcggcatgtatctcggccggtgtggtagtgaacgaattgaccttgagtgcgcggttgaaagcaacggaagggtgtcgtaatgtcgccaacacgagagttccaacactgaacatccaaagccatttagtctcattgcatgggcttccaagctacaagctgagacttactctttcatcgtagtcaaactcactttcgcgtttccgtcctctcccagcagtgtggctttcttggccttcacgtcccatccacccgcgataggattacctgcgtagtgcacatacatgtcggaatacgggcctgtaacgacatatgtatacgccaagtctgacaccaccccttcgttggggctctcattctccaagaacgcccgcacctttaacttctgctgatgcggcttttcctgcgccgaagctggggaatacttaatgtctgtgccatattcagagggcaggaaccatttcacagtaggagaggcgtcggcaagacggatgagggggatttgggaagctattgcgccccggcccaatgcagagatgacggtatcaatgcctagcatatatcaatataggaccctcggttatctcttgcttccgcgacgaatgtaaatgtaacgcatgacgtaccatgataagcctttctcacggcatcttggtcctgcacgtcccctacgagcacttcgacattcttggtgcgtttcaggtcatctaagtaatctttcttggaagccgcagttgcctgcgacgtgaaaatcgcgatccggtcgaattcgtcccgtgcggtaagaatggcctgcaaaatgtatgtgccgatgtttccagtggcgccgaagagaagaatgtttctgggtttgaaggaagccattttgtcatctgtttcttgagatcatacatgcatgtagatgcttttttataaattctccgccttccatgacaatgaaacctgattattaatcctcacgacctcccagtggatctcatccacctgcagtgcggggtttgcccaattaaaacactatattgtagtggagcgatggtggaatcggtagggatattttagtcactgtagcttgaccttttcctactaagttctggacggtgatagatggcagcggtggtagtaacgggtcactacctcgtcgtggagaaagatatggaaccaaaggaaagattattatagtgcgaaaaccatgacttaatattatcaagtgcaatttgatctttcattcgtaacgctgcagtaggttcaactgctatctgatcccgtgtctttcgagtccccgtgacttaacaaccctagtcagttccaactagagacgttgtcgtggcattccagtccgaagcaaactgtaaaatgtcagaatttgtaccccaattgaaccattgcatgattgcgttgccttacattccatgcatcaatgcgaagcagtgatgagttggcagtcttctccacgttggtcaaaacaccgatcgctaaagtgacccattagcgaataagacatgttaagactacatcatgaaccgaccaaggacattattcaaccagtagtatttctcgctgccagtctcgaaaaccaagcggagatgcagctgacctgagggagacttcggccccgaggtctgaatgaagatattctcgccatcatgagtccgtaggttgtagcgcgtgtctgctgagaacacactggtttgggggtcagtcaatccccagtcagcgccgacatcgagaatttcccctgatgcggtgttagccagtgatacctatgagccagcgatgggtcgttacccgacagatgaggaccggtgaaattccctccgacaatggggatcgctttgcggattccatgaggaccacgcgattccataagcgtgccttcacatttcacatacgctgtgtagaggaagctcaattcgggtgccgttggatacgcaggtgaagccgcagctccaggcccggcttgggaaaggagaagaagaggcacgagagtgttttttaggaatgaaaacattttgcgcatcgatgccagaggaatagatagataagaaaacctggggtaccccgcaattataatcctattcttatactgtggatctcaaatgccgcagacattatcggatctgccgcacgggtcttactcgtagtctatctagcgttcggcacttgttggttggattcattcccatgcgtgcctcggttgagccgacgctactcaatttccggagaggagctccacatggagctccaagcttgctgcatgattcgtgtaagcattctgctattttgtcaatacggcatgcgaaagccgggaaagctcccgttaagctctaattgctatataccgtgatgggatacatgcattcccgctaaactgtataatcccctttggccactccctttgatgtcaaccctgatcaactaccggtggacctaaaacggaagctccccaacaaataattatatcccgtttcaaaaagtggctttttcgaggttggatgagaagttcgcatccttgaatggaacattggcgtctccaaaatccgtgtcttccagggccgtactggcagcagtcgggagactctcccaggcaatcaagggttgtgtaccgccgacagtggttgtcagtccacattgatgattgaccggccagacactgtagtattgaatcaatggggtggtaccatcgagcgtgtagccgtcggtcgaacagtcccagcccccatgtgcagacggacaaaccgccacgatattatcagcggaggtcgacgtggagtcggacagccaaacaataacaccttcccaatcatggcggtggcctaggccggtggatggctcgtctttggggaagtaccaagagtacataagggcataatagtctcccgatatgccgcctctaacatagatttggccggtactgctactacagctcccactggaatccccggttggctcgaggccggcgctgttggcatgattagcatgaatgaattcatttcttgtgtacatggtaacttggaaacatacttggtattaccctcggcatctaccgctgggaatggcacgcatccgttgaccacatacagatctggttgataggccagatagacctcgcccgtggtgccgctggggaccgtctggtcaaatcccacgacagcatcatggtcaatgctagcgcgagggagcacagcagctcgagaatgggttcccaagagagtggtagccaagatgagtgatttgccgtacatgatgacacagacgatgaactacaccggtctaccgattttatctgtatgatttgggcgggccacttcatgagtacttatacgtttaccaggatcctatacagcaataacctgtgctatctacgcgcttcacggcatgtcagtgagctaacagacatcgcgtcggacaaattctttccgaactgctaaaagtaccgaattccttggccgaatcccggcaaacgtggcggattcgatgatcctcagtggacgcttggcaataggttcgtctacttaaaacacgccatagattttagctcaagtcctgaagaacacagtaaaggagagatcaccattcatgcgttcatgtgaaaggacctgatagggcgcacccggtcagcgatgactgaaattaatgaacacgtatgtcatttgctactccatcgtaatatacactaaggtagccttatctttctgacttgaggaagtaagtaaccaataatatcaccatcgtaagtcgtgtgcatatcttcatgttgacggacactgcaactgaagtgcaaaatgggtgtaatctagcagagccggaaattaaatgtctcggtcgtcacggtcgcccccattagacaaccgtcgtcatagtatatcgagaagaattctgtcattcggcacaacgctccacttaatcgcatctaggtctgtctcactcggtccagccggagacaaaccatcctcatatgctattcgggaggctggccttgagcttgcaagtgggtcgaaatgcggtaccgaacacgggctattgatgattcccgaagaggtcggtgatggaggcatggaagaagaatacaactctgaaggatgggattcccatccacgctttgcagccaatatcgactccagtagtacatccggctctgctccggggaacagaaacttgaaggcggattcgaagtccaacaagcgcgattccagatagctcacgtaccagcgctgtagtgggcttcggacctttttggcagggtatgtgcagggtcgaccagacgtattgcagtcagtacaggacggcctttccttggagcactgcgcaacgttcatcagactatagacgagccagtgaaccgggcagtgtataccttttgcttccggactcggcactcattgcactatgattgaacggttaatttgcgctcgacacatactctttcaaggacattgcataccgcataaaagcgtggatcacggctactgatcctgctgcacctgatggtactccgtcgacgtgtatccatttcttttcgctttggcgctcgagtcaatctgtctgtcgtagggtgtcaattaattataactcgatgtctgctctcgctattcctagtcttactcagccacatctcttaaactatccctcaccattctgaaatagcaaatattcgtgataatttgttgttttcccatggaaatccgagcaggtcccgggtaaatgtggagaaatccgacgagaatccgcctcaaccgacatccgacgcttttccgacacgacttggaaggaagcttatcgtgatcctatgcgacttgtttctctatgatttccttgaagcaataaatagagctgagcgaaacaaggacacctggacgatgtgagaaatgggagacatccattgtgcatgattatacccgtacagacacgagggacgatatgctggtctgctggatgtgagggcggatggcccaatagtagaagcatgcgagcaccgttagagttacttaggataatcataattggggatatagcaggaaattcccaccctctgggaagatgctcgtatatcagattgtcagtttcgtactgatgcttccctcgggtcaaacccgccttggcagttctcgcctaatttcgggagggcaaaaatggttgaacttcaaccttaacggagtcaattattcctagacaagcagggatcacaaatctgaccttctgctggtcattatcagatacgcagtaccctattctcgtgtctctatatccgtctttctccctttttatattgccgagtgggttccgcttgtcttccccacttccgaacatgcaggcggaaatgctcgccagcgacgacagcccagcacggaagatgcgtaaagtcacccgcgcttgcgatgcatgtaagagaaagaagaaggcctgtaccggaaatctcccctgtagaccttgtctgaaacgccaggaggtctgtacatacaactctacctataatcgcggcgtggccgtgagcccacctccgtcctcgcatacgatacaacaacatcatgcacccctaagaggaacaacagacagcaattcacaagacagccgtctatcattcgcctccccagtcacctacacctcgccagacactacacgcccggcaacctaccacgatgccaccacctccgtgatttctccaccatccaaaacgaacacaaggtatcacgatcatgagcccgagatccaacggacggaggttgcggatcgatactgggggccaacctcggcccactccttcttagatcgagctgcgttgggattgccaacgcctccctcaaatgcgatcagggcttcggatgatccaagtcacgaccgaaccacatccatcttccaatttggggatcgtgtagtcccagaaacaagcgtgacagagttccaatggccggacttagagacggcggaagctctagttcatcgatacttcgagtttgcgtcgcccacgcaccgggttctgcaccagcagacggttgagaatatggtccagcgcctgtaccagcgcggacgaccggacggcgaacagattagcggagtgacggctgtctgtcaagccattctcctgatggtttttagcaccgccaccatgttcaagatggatgccaaaggcggtatgacagatgcagatgaaaatggctggcagaccagtgaaatgtatttcacgaaggcagaccatctactatcaaaggaaagtggtgcacccagattagaatcggtgcaggtcaggttcttaatggttctctatctgctaagctcatcacgggcgcatcgggcgtggttcactttagggaccaccattcaactgatcatggccctcggccttcacagcagacggcggaatagggaaactgccgaagttagtctgatccagcaggaatgccagcgtcgcgtcgtctggtgttcgtatacgttggacaagtatctgagcttgatgttgggtacaccgcgtctgtggcatgatgatgacttggacgagagattaccagcccgtgcgaacgacgaagatatctcccctgatcgtatcttgccaccaacacgagactgtgtgatggatgcggctatattccatgccctactcgcccgcgtgctctctcaagccgccaaggagccgtacgtggtggctggcatcaccgaccgtgaggaaatcaatacgatccgagtgttgtgcgagcgagtcgcggaatggcaggcagagttgcccccattcttatccggagtcattcactcaagtagcctgatccccttattcaagcgacagctgacggtgctgcaattggcgcgatatcatgccctgatgttcatcactcggccactattgctgcggaattatggccagatttggacggatcgagaggctagctacgttcaatatcttcgagtgtgtctgaccgcagcgaaggatacagttgagctgatcaccacttttgcccgggataaccagctttttcccgcgttttggtactcgcagtatatagccttcaacgccttgtccattatctacatttacttgatccaagtacagagtaaccgaattctaccgttgagccagaccaacgtcgcgacagagggtggtctgaacgatggatttggctttgatgagtcaactctctacgtcctggcggagactgcacagtatcatctaacgcatgcgacggccaggaatgcaccgtcctggaagtacgggactattctgcagagtctacggcgagagcttgagcggttaggagcgccgtgcgaccctgtcgcaacgaatatgcctccggagcatcaaggagagccgagaatacagagtaggaacctgaatgatacagacttaggagctacgatccctccttctcagcctgagcctcactaccatgaacccttccctattgacgcgcagacccttccattgttcgatactttcacgctagacaatgacttgatcctggatctgtggtcgcaattagatagtttaccaatcagtgcgtaccctgcctattcttgacatcccgcaagctaacagtggtccttatagctatgcctggatagcctgactctaagtccgtcatatatgacggttgacaagaaggaggttcgcctaacgttcgatcctgggctgccaaacagagcagatgagcaccagaaatcaagctccaactactcccggagtgggtctacatgatggacatcctaaaataatcaagaaagactgatgacactaaagcaaagcttgatgtatattcataggtgacgtattattatggaggacaccaaagcccccctttgcaatacccaaataccttttgcgactgtctagaatatgtatttgtagcgtatttggccatcgtcttcctccgcctttcgcgcgttagtgttcagccagtggagataaacagccaacagaattgaaaagcaaacacctcctgcagcaaagctagacaggataatcccccccggccgatactgcggcgagtccttggtcgggaagaaatacgatccatagatgttcgatgagttcccaaagaaattaaccatagcgtaaacgattgctctcttcgtccgggttcgaggaatagtacttgcgatccaggcttgaaccacattgaatgcgctataagaccccatgcacataaggaacataccaatataacggaccgctgttgcttgggagctgatgaccatcacgttgcccacaatatcaatgcacagcggccatactatgagaatggctcggtagttcgtccgattggcaatgaaagagtttccaagggcactgataaagccaaagacatacactggcgccgtgataagcagtgtaacgatctttccgaagccgagggtttccacgatgctctatacacaatccatcaacaagggtttagcgacaagaaactactgggaggacttacagggaagaagtatgtccaggtttgggaagtcagctggcagatctgtatcaaaaccaatacccacactttaggatcagtcaccgcatcccacaagccctgtttgatggacccattctcgtcgacctcattgtttgttgccacggccagacgccactctgcaaagcgctgctcctgctccgttaaccactttcgctggccggaacgaggaaagtcagggagcaaaactactgccagcattccagctaccatagtgccagcgccttcgataatgaacaaccatctgacaaagaatggtgagctaatggaaccacgaccacccatgatatgcttgagcttacctccatcctgctagcccacctttgccatccaagccactgaggataccagcggccagcatgcctccaaacccatttgcaacggtatttccacagtatacaattgcaacacgtacagcaagctccgaggccttgtaccatgagctcattaacaacctagacatcatgtaagcaggagagataacagccgtcatcaaataggaatgaacatacaaagcaccaggaaagaagggagattcagcaaagccgagaaagattcgcacgcataggattccagcatagttcttcgttgctgccatgcagatggagatcccaccccacacgaaaatggcggcagggatatagcgcgacggcttcacgcgggtgaggataatgttgctaggaacttggccaaggagatatccaacgaactggacacgtcggtcgagttagtcttgaatggaacacggagtttgtatctactcttaccattaaggccacagctgtctggtactgggtgtcagaaagacccaaatcttcttgtagccctcccaagcgggcattggcaatgtttgatcggtcaagaatgttaaagataaacagcaagaacagcgcggggattaggtgaagatcgatcttgcgcaccactgttttaatcagtattgtaaaataaaatccgatcaaatggtctcacatcgtctttccaacttcaaagcttcctcgtccgaaagtccctcgaattggataacttcggggcttagtggcttaacagcgctctctacatgggaagaagatgattttgaatctatgtctgccattgtgaattaatagtccttccctattccgtctctggtctggttacaaggggtatggtacagtttgacagaatgtcaaggaatcaagagaggacagactccaaattagaaagatttcgttcttccaaagcggctggttcaggttgatataagaaaggcttctccgcatacactgtccccacccacaaccctcgactaccccaggtttatgacacggccattccatatgatagtggcctacgggaaatggtcggatatgcacatcctcttcttagatccatctcaatgtggacaaatggcatttcatagagacgcgaggcctacggagagactccgagcctagtcaacaagactggccaagcatacatcgtggaggatcggctgcagttgaaaagcttttgaccatcaagcttccacagcctctccttggctgagaaccactgcacgaaacaggccggatagagttttacccgtgcagttgccgaggttctccttatccctcctgtcaccataaagaaatacatcttagctaactcttagtatccggtatcatgcagcggacgaaaatatctcgttcggagaaggaaaatgtcataggcgtacatgacttttccgctattcttttccgcttgacttgtcggaaggcggaattctccacttccctatttggaaccctggggattaaagatgtctggggattgctttactgattgagtatttatcaagcaagctcactgttgtcaattaggtacattgactcacgacctccctcactctctccctcgacgatacgctttttgtattacaatgtcactgtctacgcactttacgctcaacaccggagccaaaatccctgcggtagggttcggcacatggcaggccaaacccctcgaggttgagaatgccgtggaagtcgcgctgaagcaaggataccgacacattgactgcgctgctatatatcgcaatgagtcggaagttggtaacggaattcgcaagtctggggttcctcgggaggaaatcttcattaccggaaagctctggaatacgaaacatgcgccggaggatgtcgagcctgctttggacaagacgcttaaggatctcggtgttaactatcttgatttatatttgatgcactggccctggtgagacgccctcgtcccaatggtgaatcgtacaatgaactcccccaagtctaacacggacatagtgctttcaaatccggtgacaagtggtttcccctaaatgaagacggcgtattcgagctagcagatgtcgactatatcactacctacaaagccatggagaaattgctatcgacaggcaaggtccgcgccattggtgtgtccaacttcaacgttcgtcgcttggaagagctccttagccaggtttctgtcgttccagccgccaatcagatcgaagcgcatccttacctgcaacaaccggacctccttcgtttctgccaagggaagggaattattgtggaggcatactcacccctgggcaacaaccagaccggagagccccgtacggttgatgacccattggtgtacagcattgccggagaacttagcatggaccctggtccactgttggctagctggggggtccaacgtgggactgtggtcctgtccaagagtgtcacgccgtctcgtattgcggccaacctgcaagtcaagcaattaccggaggatgcgtttgcccgtctttcttccctggaacgccacaagcgcttcaacttccccgctttctggggctacgatatcttcgaagaagtgggcgaggaggctgtccgcaaagcggcgctggaggcgggtcctgtgaacaagaccaagtttactgtataaacggggtgttggtgatattgggctttttcttcataaaatccaccggcatggatgttttcttaagagtctggagtttgccagtcattttcaggcttgtacacaaaattaaatagaaggacaatgcatgaaactaagtgaaagattttcaaactatcgtacaggaaattaagcggtaacccataaagtcaaatcatatgcacgctgcttatacgcaacccctaagtttaccaaccaccagggcctcccggaccaggaggacctccaccggggccatctggtccacccggaggcccatcaggaccacagcaatcgccgcagaagcagcaacagcagcagcaactgttcgcagtctcgttagtcttctacggcaggtaacatattgataggatgattgctcactcgtcatcaggtccaccaccaccgcgcagctgtaattgcatatcttccgtgggtgtctgttacaattaggcagtcagttaaccataatcgcacatcaaactagactcgtccaaacgtacgggttgatgggcgacaacattttcagttgtcggggcggctggactctggggttgagtcatggtcaaagtattgggatcccatgtgggttgagcattctccgagctctctgttttcgatgtgctaaaccaactaaagagaccttggccgaacatgatgttgtctgtttgtgattgtactagctgttcctttgttcctggccttgtagcagggggagtggccggtcttaagaaggaagcgtcaagcaaactccactctcgatcatcgccgatggataaagtcttagactaggcaactgcttattgtgttgcgagatttgggacgacgttatctcgtagctgaagctttctccactatgtggatccgaagcctcctcgaacttacgtatacctcgagctgtagagctcggacgagatccgccgcagtccatgaacctactaaccaaagaagaaataactaggagaaaagtagagcagggtgaaaatatacatgaaagagaacacaagaaatacttgtatttgaatgcaaaaagtagcagtgcaaggaggtcattcccagcgcaaggcttgaaacttgcgcagagaagtacgcgaacacacggatctacactaacgctaccaacgttatccgtagttctaggagccaatagcttgacaataggtttgtggcgtcagggccaatgaagaccactcagagtcttaaacactaacacactatcgcactccggcgaggattcacaccgcaattagatggcataccccttcgccacgaaggattcgtggaagctaaaatagaaccagagagcatagtagtggcactagtttgcacatcgaaaatagaacacatttattgccgaaatttcaaggagaaaggcagagatcgactgaatctgatagagaaaaagcccatatctccgagactagccggttctggtaatggagcaatactttcccgctgaataagacagagcaaccaatcatgaccatcagaacggccaccagccccatagggtttttgcagattctattgtagcgattgtggcgtaccgctaaagaaaggagaagcagtagaatagagtcacttctatccagtagtggtactagtagtcgtagatcactcctggcataagggttaaagattccgaagcggcaatggtatagaaatgtgcaactagccttctctaagaataagactatcaactttatccgacttccatgttaatcacccacggcactaggaaaatatatatacatcttcaagtctagcaagttccaacaacatcgactgctgcatgatacttcgttggatcataaggcaatacagacgggtaaatacgaattttaatgaagcaagggatgcatttaacaatgttgtcttggagtacataagcggatacctgataatagcatgcgagactgtgtctgaccccagatgaatcaacccataggaatatttgatagaatgatataatttaagccatgatttacctatgctatagagtatctgccattcgtctaatatcttagcaataggagaaacacagatcaactattgtcggattatcttacaagcagcctcggaacagttctcccgacagttatctgccacgactcatacaaatgccgaccggaggacggacataaacccgaatagcggcagctaagagccgaggaaatatttcgtcaatcagcttgtctggagaaccgatccccttggcggatgatgctgtgtggggatttccgctcacaacgcggaaacgaggcggaaaagcagcgaccccaagtcgacggggtatacgaggtactccaacgaaactatgcaacggtcctcgtgagatttctgtcggagcacctgaacagaccccgcatctttgccattctttcagacgtgggacattaagtggtgtttcagactgtggggtgggcggaattcttccccagctataaaccctcaaggctgcgcaactgtaaacacagcgagatcaagatagtcaactgagttaatcctgttaccatggcctgcacagcgccatcgctgccggtactatcctcaccggccacttcagaggctgcatctgcttccccggaagtctcttcccccgtcacgtcaaacgacgagtacgatgagccggagcgcgagatctacacaatccatgacctcctgctcacgcgagccaacgggaaaacagccgatgaacctattgtcgcatacccttccaaggacattgactatgtgtactacactcctcgtcaggtacgcaccccacctatcccgcgcggtctggagacaccatagaactcaacccaaggctgacctgggatcacagttacatgactatgtggaggctgcagctatccactatgcggagctagttccccagcgtcggtcatcagaggatcctgtgcaggttgtaggcttacttggtccctctgattctgaatatctcgtcacattgatggccatttcgagactggggcacacggtactgttgctttcgacgcgcatcgctgaggatgcctatgtcagcttggtcgacgctaccaaagcctcctttctcatcgctcaggacggtttcaaggctatggcggacaacgtaagcagaaggacgggggttacggtgcagccggtcttaagacgcgaagactatgacagctccaccaccggcaagctggtccttgacgagaccaaattcgatggaccgtcggagtcaaagaatgtgtgctggatcatccattcgagtggctcgacaggacaccctaaaccgatctaccaaactcatgctggtgctttgaagaattacgccaataattttggcctcaagggatttatcaccctgcctctctttcatgcccacggcatcagttgtcttttccgagcaattcactcgcagaagctaatttacatgtacaatgcaaagctaccattgacggcctcttacttattatccaccctgcagggacaccctgatattcaagtgctctatgccgttccatatgccttgaaactcctttctgaatcagaacagggcctcgagtccttggcacggatggagctggtcatgtttgggggctcgtcctgtcccaagccaattggcgacactctcgtgaaaaatgggactttactagtttcccattatggaaccactgaaaccggacaactgatgacatccttccgagagcgctcagacctggactgggattatgttcgaccgggtccctccttgctgccatatatccgatgggaagagcgattccctggcatctacgaactgtcggtcctagagggttggccatcgaaggtggcgagcaaccgccccgatggatcctatgcgaccaaagatctattcgagaagcatccgaccaagcccaatgcctggcgttactacgctcgactggacgatacacttgtgctggagaatggtgaaaaggctaaccctctcattattgaaggtgtggctcgtaatcatccggacgtgggcgaggcgattgcttttggtgccaacaaggatcgcttaggactgttcctagtccgtgcagccaatgctctgagcaagaccgacgaagagatcattgatgcggtctttccggccatcgaaaagtgcaatgcggactccccatcctatgctcacatctcgcgtgatatgatccaagtcctcccttctgatacggtatatcgagcaacagacaagggcaccgtcattcgctctgcattctatcgcgatttcaatgaacagattgaacaggtctatgaactgggggatgccacgggtgatcgagtccttgagggaaccgagttgaacatgtttctccgagaaagcttgctagaagtggccccaacgatcaattcggctgtgttggatgataccaccgacgtgttcagtcttggtgtggacagcttacagtcgattcgcttacgcaaaataatcaccaagacgctcaacgtcggcggccaaagactatcccagaacttcgtctttgaacatccctctattcaacgcatggcagatgagatcacccggctccgtctggggctcgatgcagacaaagagattcccatcgaggaacagatgtcgcagctgattgacaagtatagcaacaatttcaaggcgcatatcccagtacgtcaaacagttaatggggagcgcatcgctgttactggggctaccggctcgctgggtgcccacctcgttgcccaactggttcagatggaacaggttcataccgtcttttgcttggttcgggcaaattctgcgcacgatgcccttcgcagagtgcgccaaagcctttacgaccgcggtcttttatacagcttaagtccgcctgatgaacgcaagattgtcgctttgcccgcacaactctccaacacatctcgcctcggattggatgaacccacttacaagcagttaactcagtcacttactgcggtgatccactgtgcttggtctgtcaatttcaactggtctctgggcagcttcgaggatagctgcattgctgcgactcgcaatctgctcgacctatgtctggatgcacaggcgcctatgcccgcaagattctccttctgctcgtctgtaagcacagtggctcggacccctggccactgggtaccggaagagctgcctgagtctttatcatacgcccaaggcatgggctacgcgcagtctaagctagtgacagagcacatcgtcaaccgcgccgcgcaacacaccaacatcgctgcccgagtcttacgtgtgggtcaaattgttgcggataccgtgcatggcatctggaatgctacagaggctattccgatgatcctccagacggcgaagaccatcaaagctcttcccgagctagacgatattctctcctggaccccggttgatgtcatcgcaaccagcgtcgttgaactcaccttgggaacgaacgtagcgaacatcgtcaacctgaccaatcccacactcagccattggactcgcgacttgcttccgtttctgaaaaccgctgggctagaatttgagcaactgccccagcgcgagtggttgaatcgtttgcgtcaatctaacccagacccagccgcaaatcctccaataaagctgatcgagttttttgccagcaagtacgacaatgaccggcctagtcgagtcctcctctacgacacaaagaaggcgcaggccggtgcaccagctctgcgccaagcgggaggactcaacgcacaattcgtatcgcggttcatggcgcatttccaaaaccaatgctggtcaaacaaggacacaacatctatctccaagaagtcccgcgaggttatcttcctggcaggtccctgcggctgcgggaaaagtaccgctgcacaagcattggcgcaacgattcagcatactcattattgaaggcgacgatctccactctccagcgtctcgacagcggatggccaacaatattcctctcaccgatagcgaccggtgggactggctggctcatattcgtggagcggtgatggatcgacttcaacactcagcagcaccagcagtcgtggtaacctgctcggcactccggactatctaccgtgatgaactacgacgcttgtcgcgactatttgatttccccgtcaatgttactttccttatgttgtcgatcaaggatcgagcgcagctgaaggaccgtctcattgcccgatctgctaaggagggtcattatatgagctccgccatggtcgactcgcagttggataccttggagagtccgtctgggtctgaaggtgatgtgattttactagattctgatgaaccgatggagaagatgcttgagggagtacaggatgttgttcaagggcttctggatgtatgatcggtttttcttgacattagggtgttttagcgtaatgttgttattgttgtttttgggtttctttttttcatccattcgtttagatgtcaatagaggaatgaatctatatgcctatacttgctaaattttaatatatccctttgagcaagtgcaacaggacttcttgaacaatacttgcagtcggaaggtcagacctaaatgaatgctgaccaaagcggagggcctcgttcattgcctgtttcttcttgttcggcctttacttgaatcaaggctagccagcctctatctatcatagccagtacatgcgtagtaaggtaccctgctagggactggtaaagataaccgcataatagatcatgatcgaatttcggaaaacaaccatcgtatttatagtgtattgcgaatgttgaaatattcacgcttgccctagaacgaaagccaactccgacatgcgacatccctcacagcgtgtacttgaatagaggagacttgtcacccatcgccaacagctcatcgtcactgtatcgctctctgatctccgcttcagattcctttgccttcctccggttggcgtagatatatgaaagctctagcagaagcgctacgatcaatccagagccaccgaaagcgagtgacaagccaaacccggtataatacgtgggggcctctttatccatgtacatgtaactaccgataacgccgccggtatttccaatgcagatactaagagcaaggccaatcgctctgcgtccggatggagccaggttgttggccaaccatgaggtggttgcagggtgagtcgggtaaagaccgatacatacaagtatcatggcgaagtaggtagggccaatattttcgttcaattgtccatggaacgagatgacaatagagtaaccaattgtgactatcgtcaatggtatcgcagcgaaaggcattcgccagtaaaagtggtcggacagtttagaggaacagatggcggagatggcagccgcaatatacgggggcgcaaccatgagctgtgcgttcgtattggtaaatcccatggccttcgtgatagtaggcatggtaaatttgaggcctgtgtattccttgatgagtgcgacaccctacaaataatgggagtcaacgaaccgtatgcggcggcagactggcagagcaagatgtacgacagcatatacaacctccagttggaaaggacagtcttaagctcctcccatgagaccctctttctctgctccttaaaatcacccccttcctttatgaaatgttgcagctcaaggtatcgtatttcgtcagggctgagccacttgctcgatcttctcggtgaatcaattagcagaaaaaagcacatcactccgagtactaccgttgcaagcccctccagcaggaagatccatcgccaaccttcctggccaccaattccatgcatttgcgcaatgccggcggctagaagacccgagaaagccccagaaagagcactggcacagtaaaagatagaaacgcgataggcgagatccttcggcatgtaccagaatgtgcatagatatatggccgcggggtagaatcctgctcttttgggagcattaacaatgtacatagttgagtagggtaacttgggcaaagaggacttactcgaaagcacctagtagaagacgtgtaatgagcaaaccagcgaagttttgcacaatgcctgttagggtcatcacaattccccagcaagtgatgagaatccccagatagattgaaggcctgaaaaagctcttcagtaggatattactcggcacctctgcaaccatggttagtgccgcgcggattgtcaggccgtaatgcatgcttacccagaagcacataggggacgaagaaaatgctcagtacaatgttatactggatgccacttagtcgcaagtcttccgtgagtccctcaatctttgcatttccgatgttggctcggtcaatctgagagatcaagtaaagtacggccaacattggcaccaagcgaatatcaacctgatgtcagggggtatagattaatttagtcccatgggctcatatacctgaaaacgcaccttgcgcaagactgcctttttctgctccgccgagaagtctgtgtagaattgcgcgtcctcaggactcagaccgagcacctggatattgtcaatggtgatgaggctcctgacactctccacatgctgagcatcatgtttcttctcgtcgacaatatctggtgccgacattttcaggaggtccgtcccagtcttcggccaaaggaaatcagtgtgactgagaaatcgtgatctagaaacttaggagataagaatttccctgcaagtagcaggggttctcgtaagcctaaatatcgcccatgacatcatgccagagagattcctaatcagattatgacgattatctcctgcacaattatgcgaagctttgagcggtgtccttggagagctatcataaccaacgcgcacgttttccaccaggatgcaatgctaagactgctcgagcgacaaaatctggggttagactttggggatactctaacactatttcaacactaatgcaacgactgcggggtgatgcccaaccatttgggagcccagctttccactcatcgcgatcatcctaccacgagaccgcaactggcgagccttggcagcttgggctctgccaagtcacggttcgattggaaaaggcccattactcgtgtcatcctccttgtcagctggcggcttctgggtagactcgcgagcattggcaatatcagatcgtcgggggaacttctttgtatcgcttgcgtgtcgttcagccactaggtcattcgcgattgcgtcagaaactcaggcgctatgatgtccgtgcttacggtgatcgggaaactttgtatggtcgtaagtcttcttgaatatgagtattgagtttccatctaaggatctatcactctttgcgatggtagaggctatcgtgtacccacaccatctaccacatagatagcatgatgggattgaaagcgatgatcaagaattgacgatcccgcgagtcctcgtatggactccaaaaagtcggtaaaggcgactttgtctaatggttggggaatcgaaatggaactgagagttcgaggttgaaatagaggttgaggctgcggttgggaatcaattcgccggctgaccgtgtgaccataaaagaacgccctagaaagaacgatattgctcaatgggtcaagtctttactttccagaaggattcgtctactgcaaaacatccaagccagtcacactttaagcggttatcgcaccactacagcaggttatctcttggatcagtgtccccccaatccgccttccattgtcgtgccaaaagctcttttgcaccggtgtagtcaagtcgcgtcgcatgccacataacatatccccagcggcggataatatcctgcacgtagtatccatataggttgctgtaggatcccctccatatcagagtccaggccagaggtgggtgtactccgtttggatcgggtacttcatccccttggaaaggcagtgggtcgcgtctctcttgtcgcaggtcccaattcgagggatgctcctggcgtcgctggaactgtgccgattcacctagggcttcaccttcaaggaagttgcctgtcggccaagatatgtgctgttgcatcgtcgtgactagatgtgtgtggtcctttatctcaaagatgaccatgtgtaagagatcaagaccacaagagattgttcctttcaggagactatccctggtccctgttattttataaagttagttgctctcgagcatcaaagaccgtcggagacacgcagaggaatggagcagggctgaaactaacaactattatctaggtcaaatgctccttcaggggtgggtggccgttgtccttcaaatttggggttctcttcgtggacattccagcggatgtcgttaaagatctggttatatctttctttagcgaaggtatagatacaggagatttcctcgacctcccaaggctcgaataagtctaagaatattgtcccgatttccacagagtcgaaactcagtctttggatttgtgaggatttgtggaggcccactcccaacaggttacagcagagctgaaaccgatacagggcacgtatcagtcgtgcctcctccatcttgcttagaggctcgtcacttcgtggcttatccgtctctatggcaagattacccaacgtccagctagtgtagtactgtgcgagtggtttgacaattgagaagtagaacgctgctacgtccacaagctcatcaacattagccatttcgctcggtactgaatgcagggatgtatcccgctggtcctggtaggattgaagaaacatattgactttctctttagtgcgcgagtgagaaaagtcgaccaagcgggactgataaacagcacaagcgtcgctagtagcgctgcgcaatgttgtctccaagccactgcagagtaagcgtctgcgagctgacagatactgctggtggtagacaggagacgcgtggaccaaggcccaaagtgtttcaagttccagcatagaaaggaggtgatgccgaacttcgggtggaagatcttccaccggtgcattgcgatgcagtatatcgcagtccacccgtttctggagctttcctcgtgcaggtgtttgcatagagccgacttgacctgccgtcgccgcgggagttggatccgaggtagacgcaggaatccgcatcgaatgcttgaatcttgagaaaagttttttcattccgaatgtctttcggtttacaaaagtattttaggataagatacaatcaataacaaaaggaagtataaccctagacgagagcgacggccaatttggcactgatcgcgctttaatgatcagccaattgtagcatcaccctgaggggcatcaggattcatttcgtgatcgcaccgtccggaaaccgtagatagacaagtctagagcctaacctcgaagaacattaattcgggtgctgttcttttagtgccgtatcacagcgttggtatggaattcctcttccagcccctgcagtgttgttgttgccttgccgtaaagagtatagttcacttttgcccgatcaaggcaacactgctgagtcatgcgaatcaacatcctgaccatgaaatctagagaaagtagtcggccagagcaaagaagacagggcgagaaatatgacaagtgcatagttatcttcgcagtcgggttatgctgggatgttgggtagctggactccgacgtacttggcaggaaatatatcttcggcaaacatccagagaaggaatgagtatcaatgcgcaaccaaaccacttgcgcaaatcattttatcccacaaatggtgacaagtgtttatcagaacgagcctggtacctcccgcattagcatgcccaccagagaagagccaactaacgcaatgtaacccatcagttacgccgctatcccctgacattggccctccggccatcttgttcctggtaactcgtatctatgaagagttaatgtcctgtgccaagaaaactcgatgatcagtgttgatcctgagtggttgttcggcaaattgaatacgaggatctgcagttcaccatccatgcttggggaagtcatttcgcaaacagggttgagaccggcgaatacttaaaaagtgaaggatggacgcttccctcccgaaaggtcctcttcttcgtttgccgctcttctttcaaccctacatacacgcgatcttcctgtcaaccagtaaaagccctccaacatgaagtggtcagcattggttcctctatcggtctctgcactggccgttcttccctccactggtgcgtgggagttcacttggagagacgccagcaacacaagacacgtggaatccggccacgggccctccaagtgtataaccgtcgaccataagaaaggaatggtattttccattgatgcgcaaggcgaaaagaacatcaacatgttactgtacggcaccgatgactgttcgggcaaggctgtgggacaggcgaccgagcgcttttccaaagcgtcgtcggtagacatccatggtttccaagttgagagtctctctaccggatcgaatgcgaccacgactgctgcgaatgctaccgtgacatcgacaagactcactcaatcgtcctccaccgccaacagcgaatccagcgatgtgccaacgacgtcggcgacgaccacgtctgatacagctgccaccaccacaagtgcgagtgaaacaagcacgtccaccccgaatgcatcactgcgactgtccgctgccggtagcgacatggccaagactgtgattggtatggtgttgggacttgcgacggtcgaatggctgtgttagtcaactctggtggtaatgagaggaggagaggagatggtggaatacttatggttgagtagttatagtctgtgtactttaatagggccctcaatatttcatagcagctcctatggctcagttggtagagcgcatgactagtaatcatgaggtccgcggttcaaatccgcgtgggagcagttctatttttttccccccttttttcccccccaatcagtggattgaaccacaacagtagattttataatatatctttttctcattgctcgttacctatttttgctcggctcccaccagcaaactgtcaacgtgcggccctatctcgatgttatgcctgctaatattcggaacgtgccatctggaagggatgtcgaaaaagaacgacctcgtgtcgttgcaccatggtattcaatttcataattaactacttgcgatttgtcctttcctgacccgcgccttagcaaggaggcaacaccctctctgggcatgaggaacagaatattgcttgctttgcgctatatatgttgttgggatacctatgctaaccaatcaaagctagctgccccagaccctccctaagtgtacttgccagtcaaaaaccagtgacctccgtcatagatcggtttacctttagagggcgaacatccgatgatacaccaggatttccaatgggggatcctgaagcctctaggtacaaagcatttggctataagtcaagactcagtttcctcgtcccaatagtcttttctgctcacctgtgagctttttatacccttctagcctacatatcgttgcattgttggcacttttatctaccctggataccagataactttgacaagttcgatatgcggataaattgtcttataatcactattctgcctagagcggagaaaagtatctgactatgctgggtaatccataagcattcaaaatcgagcgttgacccgaatataatttgacaatgcgagcaagagaataacattggtgctatgtgatcagaatttcaagcgtggaggggagaaaaagaagaaaagattgttgacgcgagacatgtgcggggaaatcaacaagctaggtacaaacagtgcaatttggcagatgcaatactgtcatggatctatatgttgaatatagatcctggatacggcagccggccagcacatggtatcaatgcaattaccaccaccccgtgtaagactggagaaagctatcagaagagcaagaaaccaagtctattaaggcttggaccaggacaggtcgatagtaccaattatgttcttgatattgtccacaaataaatcaaccataccgtttgtcactcctgttgtagtggcacggtcataagggatgccgtgatgcgagataccaatagtgttcttgtagtagtgcaattcgtgtgtgcaccctttccctttggtgccaaaatctcttaatccattctcacacagagtatccagtgtggctttggctatcttgccagcgtttagagcagcacgagtctgaggtatcatattcattgttgtctttaagatgactttcttgttcttcaacagccatgaatcggatttagaggaggcatccgtaaagtggtgagtcatatgggtgatttccttgtccacccaacttccgacaatatcatgacagatggcatcaacggcagcacgaaatggggcggcttcttcgaagttctttgagagttccgtggtacagctcgtcatattgacttcctctgagattgaaaggggaaagctcgctgcacagctatcggccttcttgccactaggagcatggaggttcaggtcaccattgccatacacaccatggcacttgaaagcaatgttgccatccacaatattagcggacttaaagccatttagctgcttgacacattgcaagaaactggattcagtccaattggtctggacttccggggagtcgatcgtaactaaagcttcatcggctgccggtgcaggggcagcgtcagagcagaaaaaaagagagcttgttatgataaagatcgtaagaagaaacctggtattcattctgcaatggaatcctaagtatggataggcttgatggaagaactgagaatgatgtgatgctgcaatagattctctgaacatccaaagtctacttatatctgtctgctggcgtagccttccattagatgatttgaattaggtaaccgaaactccctatctacaatactttcttttcacctttccctcattacaatacagtatgacgttgaccaacaccaagcattggatcctttgctggctgccatagatggcccaggcttccccgtttcatctatagaacgagtgccacgggtctcatgcagggctcaagcactaatacctaggggtggcactgcaataacagacactactcacatagtaccattgttgggggtcatgctgggatcaggtgttcaaggcacgaccttgatgccatatgttggtcgagttggattgacataaaccgtgcattagcacttgcaccatgacgtcactctatatctgaggctcaggatggtgtatagataggttgagcgtttctaattatggttctaagccaacagtgtatcaaacaatttttagatatttaccgattctgattgtaatatatcggcatacggtcaggtgtgcatttctaatgtcgcaatgcgcggtatcctatatcctactggaccaatgttaaattgcatatccaacaacgacgatcctcatatctcggtcttcaacagttccgagatatcagaacgctcttttataccaacattggcactgtagaagagcgaattagaaaagacgatgttcgcgtgcagttggatcagcgcgctggggccccatcttcacctcgctagtggttgcatcctgttggccataatcaaggctaatgctagatgctctattcctatagatgggagttcgccatatgtgtcctcaaataagcttcggaaagaataaagttgaaacatatgtgccttacgcctcgaagttcgtgatcatctggatactagggtttaatccaagggttgatgggtcaaggagcaactaccaatcattagggctaacattatatggtatgtactatttctaggggctacagtcgctgcctgacaaggctaccacatacatactcttcacgggggccaaatcaacagcgaaactgaaccctatccgcagctaattgacgaccaatcacttcgctccggattccatcaactgctggttttcgagaacctagacataccctacggctataccctcagggccggttacctggggatagtggccgtatgaaggtatctctacttataaatatcgtccttatcctctaggaacaacatcatcatgatagacagcaactacctacgaaccgacaccattaccacgaaacaacaaaagccgattgagaatatcatacatctttaccttgcctacaatgcgctggatcatcccgaacctccttgcagcgttggctgtcagcagtctcttttcttcagtcattacgtggcccactggagacagtggactcgggaaaggccagtctgttgacaatgatttcggtgatggtaagaaggatcccttgatatagttgatcttctggcgacatacactgaccccgagaagaagtcggaagctatgactcccagccattctatggtaggagagagataacagaatcgctccctggactgtccgaacacccggattccgagacccatgtgggatatggagctatcctcgagcgcgtcccacgacctaacaccgataagcctaacgatgatgccgatgttcctgatgttgaccaggaggacttggccaccgcgctcgaggcgatccacctagagagccatagccctagcatcgtcagtcgaggacaaaaagaggaagcggaactgtcgtcgaagttcggatcgcgctggaaaggggagacattttactacttcattgaagccaaagacaagaacgccaagaacttcaatgcaaatgagatcaagagcctagcaaaaaagggctacgagctgattaaggataagtttaacttcaacgggaatgtgatcgtgtctgcgctctttatcccagaagttggagtcgcggtaggctccaagccccggggcacaggcgtcgttgaagagattttggaaaaaagccacaaaaccagcggtaagaatgtctttgtggggacctggtttgagagatattgggcctttatagacggacgcgacctcacgcatgcttgtgactccgttcagcaggaagatctctaccacgcagaggacttggtgattatcaagggagcagatgaatacttgaaaaagatgcgaagcgataattggagggataagaaatttcctcggggaacgcatatggtttcatatggcaagtataattccgaggataaatctgcgggaccaaaggaaccctgtggtggaacagaaaaaacaaagttgaccattccctgcaaaaatgttgcacatgaactgaatattgactggtcgacctgataggcatttctttggatacctttggccgttcgggtttcttattgcccttaccctgtatcaaccttttcggtcattatagtgaatccctgttctgacgagttgttgttacggtaatatgtactcctggatagtaggaatcaacgatagttaggtttcttttggtatctctctgagcatgactacatattaagttaggccgtatcaccatgtcaaaagatcgtgtctctatctagtaaccttcgtggctgacactagcagatttagtattgctggatcatcgtgctgcgcggcataggaaaggagtgttttgccgttggcatctgtttccccagtatctattacagatgaattccgtatcagcagtttaattgtctcaagatcaccatgctcaatcgcatatgacaatggtgatcgtcccatataatccctttcgttcggaaacccttggccattctgtttcaataataggtcgacaatgtctcgatggcctccctctgcagccaccgacaaagcattgcgcttgtcctctttgccttttgctgctacgtccacctttcctgtccctaaaagaaaaacaactatatctgtatgtccttcacccgaggctgaagtaagtgcagtactcccagtactcgtgacagtattgaggttggcccctgcttcatatagcaattccatgatggacagatggccatacaatgcagactgaatgagaggagaccgattatggctgtctctggggtcaggatatgccccctttgcgagtagaagctgcacgatagtttcagagccaacctgcgctgcccagtgtaaagctgtttttccactggaggattggtggttcacattgatatatggtgtgttaagcaacagctccactttcttagcaaatcccctgctagccgcgaacattagggcagtccaccccttcttaaacaaatcatccgtggctatagccgcattgacatcaatgtcctgtcgagataggaattgagacacagctgcttccgatccaaaactcactgtccaggccagtggcgtacggccatggtgatccttcccattcatatctacgcccggggtggcaagcagctgttcgatcactggaacctggttgttgaatcccgcatgagcaatcgggggccttcccatgccatctcctagattcgggttgatgccttttgttgacagcaacagggcaactgtatctacatgtcctgccccagctgctcttgctagaaacgtcacccatgatctggcctctttgctccgatatcggaaattaggatcaattccctcttgcagtagaagaaccttcgcgatacttgtgtgtcccgcgtgcactgctattgacagtgcatcatagattatgccaagttttatattgtttgaaaccccgaaactagcgttcagtgaatgttgcgcggtctcaactatcccatgatctgcagcccacagcagtgcggacatctgtctgtgtatggcattgaaatgatacaataaagggttgattgcactgtgaaagtggcggttcgttctggctaacaagtttagatctgactctagggccagatagcctgcaatatgatggagaatttcatttggtagatctagcaacagccgcatcgcgttctttcttcggttaatcgagtttattgcctcggcggcttggtggtaacttttgggccttgtagatggaaaggaaggaccgtataattaaatagatagacttctgagaacagcatggatgaagtagtccgacacagaaagcagcatagagataagcagttggcagtccactttgaagacaagaagcagtcgaggctggaagaattaacggcgtggaaattccccgcgttatggtcccgtcacatgacggcagcgccaacagcggcaaaatccttctattttataggttcatttatattctgatattcaagttgtcacctgcgtactcatcataggccccacctaccagctaagacggatattacttcccaccggcatacagccattgccatctcccgtgtgtacctgaagtgtggcaggctagccatggatcctggattgcagagaccgtatatgcgcgaggcttacaggacgcaccggtactgcttgctacggttggataatggagatcgatctagggtcacaaaagcgatcggtggaggacgaggaagagcaaccgggaacagcgatgtgtcaaacgatattcacaactactacttccgcatgaaaaacaaaggtagatagcactatatgacttcgagcacagaaacacaatcacagaaggggcagagacctagacagcttccaaagcaccgataagagaagctgtgatagctgtatcaaagctctgtcgagtacctaatgaaacgtatcaggcatagcaaaaccaatatcaaaaatcgcctgaatagcacctttaccgttcctccatatagtggttgatggcttgacaacatgatcaaccggatgacgaatgatcccatacttcaaaacggctaaacacgtctctgcctggtacttaatcgcgtgcacgcagagatcaaccagctcggatttgacgttgataccggctacattggccaccgtacctataatctgcagattgcaatgtttgtgggtaattgaaaaacctttcctatgacctccccgaactgtgagggcagaggaaattgcgcctgcatccttggtgacaatcccctgtcccacggtgaccatcgtgtcgcagatagaaccggccaggtctttcatatctatactgacattagtgattatcaaggtaatgctatccagctgtagaccctcaaaggatacctacctctccccgtaagaaggttaggcagcaaccttccagggaccgagcaaatgccgctgcctgtgtttccgtctgctaccagaatgctaggcgagatagatataggctggtcatattttactacaccgctaatggccggctgcacgcatttctcaaactggtcgtgggaagggcgcttcttcggccaatcaggaactgcaccagccaattagtaccatgggggcaaggttacggaagagtcgtgacaggattaacagactggagctctgtaagcatccccctagagcagtcaggataacagcatcgtgcacgttgtgtctatcaaggagagagcgtgcatcatggtcaagtctttccgcagaggtgaagtcatggctgatgatagaggcaggaatccaatccgagttctgcggaccctgtgaactgttcctggccaaggtgccgctggtcgggggcatgcacaaggctaaacgaaagatccatatagcaataatggacagaatggcatgggttgggactgtacgtaatcagaaaagcatcaggcaagcccggtgatacatacgtctcatgttgattgctatcaataacacagaacagaagacctgtaacatagaattgaagaaagagatatgctgtgactgtgagtatggattgaactactctatcttgacgttatgttcaagccgggaaaccacctgcctttataacctatatcctacagtaactgtctacctgagcagaaatctaaatgtacagcacaacagtagtttagacagtgattggtcaagacctctcctgaaacactctgttttatctagatggctcacctcttgattactgtaataatacttttgtcgcgtgataacaagcagcggctgcgaagataatcaggagtacagttgtcgctcgaatctcgatagcctctgaccacgagtatcgccctcattcatagaaactaaaaatagtcctgctctttctaaagttgatgcctagagaactcgatgcagcctaaaaagttctcagtcagtcgtgtcatgaggaagaagatccatgttcaacctgaaatctcctgtgattcgtgaactgggaaattgtatcatgttgatcacactcgtaatggttgactgttaatccgaagaaagtgctcgattttccagacgcaccggtgacatgatacactgggggaggtagttgaaggcgtcttttagatcttcaaacaagcaatcaatagctacgcccctggcctgggctctagtctgaatacattaggcagacctttacagagaccaggaaacagagacagaccagtatgcacatatcgcagccgaatatatgaccgtgatttaagtatcaaggtcagcatcagcgtgacgaaaaaaacaaaaaaaaaaaaaaaaaaaaaaaaaaaaaaaaaaaaaaaaaaaaaaaaaaaaaaaaaaaaaaaaaaggaaaaaaacactgctgttatgttggggctagatagcgagagccggataccggaatggtgacagaccaagtagttttcgacagataaagcatggctgtgcccgcgcaaacaaggctataaaagataaatgacatcatgtactttcacttatagtcaaaaagaccggatgggatgatgtttgcctatacttcgtaacatgcgaggtcttcccccctgctccgctgggaaagccggatcaagcatgattggatccgtgtagaacttcggtaaggcttgttctagccagggattaaatgacgttatcagggcctgtctctctctctctctctcttgctgtgccaatcattctgtcttccgcaatgttgggaggggtagttccagacgcagggacctgaggcttttcgaaaacccaaaggggtcacattagattgctcttcttcgtattttaccatactctattttgttttttatttttatttctgtttccagtagacaattgcgtccaatacaacttgctgcagtggcaatgaatccgaatttcgagagtgtcgaattattattgtcaacaggcaccgatatgacgggcctttgctgcttttcagtctctcgcgaagaccgtttcctgggcctgcttttccttacctcggtagtggcattcctaccctacctagctagagtcctacatcataatagcatacagtgacctagtgttattgagttagctcactaaccaggagagcaaagaggggcagacagtacaagagattgactgatctaacaaaaatagctaaatgattaagctttgctaccttggatggtcggagcaataatattatcgtacaaagtactgttggcctccatccgcacggggagctgatcttactgcaccagggagccactaaccaatagaagagcggggtaaatgacaccttgaagcgacgatacgcaaggctgatcaagaatggaggtgcctggtttgttggcagcctccaggagatgaactgatccaagaccgtcgctaatgcagaataattcgcggcaggtccagaaacgggcggaattgaacaatactaacatgatcacctgcgttagtacaaggcagaataatatcactaaccccgtttgactcgcgaccctgtggattaagcgccctactagacatcggcgctacaactaacacgaaccctagtcctacagcgcgtcttaccttccaaccctgtgctagtaaatctccattaggcatatgcactgctatagtatgcgcttatatcttcttatttaagaccagctaatttaagacaccatctctgtgtcgtcagtggcataggctggaaatatcggctgcctgccagaaagcgcaagaaggaagataggggggtataatattatttgatcatagaatcacaacaacgctaatgccttcgctactattgttgtttctagagagatctacatagtctatacatactctcgtgatatgataatttccgtcccaggcatcaaggatttgaagcccttccaggcgaaacaactaatagcaagggaagggggctcaagcgcatagttggaaccgggcgcatctattattcgtcccctagaggcaaagtcccgagacactggtactctataggagagtcgaagagaccaacatcaaagcactgaagacctgccagacggattccattctttgtacccctcgttgaaaattattgtactataactatatattcgtcgctttggttctactgaaacctaaggctttactttatactatcagatctttaaaccatcatacaagccattgggaatagcgcgccggttcttacagccacgagacaaggcggccatggtatacatcaatcacacgcagctgcgcgggccagcggagataacccgcattagccatgacaagctcagcggcaccactctaggctatccagcaggtagcagtgcaggaagctcggtaaccagtctctgcagtccctccgtagccgcgagctcagccggttcgagcgagatactggtcggacttggcatctccactaccacatcgggccttaaactagacgatcaccagctgcccataacgcctaggccgtcccgtggccattgcgttggaggcaatgttcccgcatgtcttcagaaccaactagacaagcccctcccaccactgccattacgcgcgagtgctcgggaccacggtctcgccaagcactatcccttaccccctcgcccacaagggcggaagcactggtcgctccccaacaagccagaagctcatgacctagcggccctggatcacgccttcgccagaaaaggcctgcgcagcaatccgctgcatcgcctccgcgtccaccgtccccgccatgatctgcctacagcagtgaatacagagcacacagagccaactccagatagactcacgtcccgacgctggttagtgcgggggcggacgcttacgcgggcattccagcacttccggctaccacggctaccacggctaccacaaaagccatcccacgccattcgccagtccatccgccctgttggagaggcgtccacgcagcctccactgtgccacacgctctcgagaaccacagggccgaatgggccgccaattcacgcccactctggggcggctacgcgcatgaagcgcatcctgtctattctactggaaaaccgagcctccctctgcatgcccgatatgcccgaggcagacagggagcgatatgcgggtaatttcatcgaacaggcccaacgactggtgctggactacttgcagccaaccttgtcgaccgcgtacgctggctcctccgggcccatagttccggtgcctcgaccccgtcacagtatctacgagctcggcgtgcggacacgggtgctatcccacccgtgtgcatcgtctgcattgaatgtgccggtccccgtcatgcggcgaattctgcagcaggttgactgcctcgaggatctcttctctctggcccgagtcaatcgtgcggcatacaaggctttcaaggcacacgagctgcccctgattcagggaacgttgtggaaggtatccccgccggcatggaagcttcgccaggtctgtgaaattcctattcggtatactaaagaggattccgatggctcaccgctggcggcgagtctctacctgcggcactacgcccgcgacctagacacgctcgtccgaatcaagctcctaatttggtattattgccgggcagttgtacgagaagagatgatgacggctctatgcgaacctgacagcgaacagggcgccgcggttgacgacgccaactggcgcgtatggaccttctgccacctatttgggagccgaaaggaccgggagtgggacctggctggacagatccagtggctacgtgggaagacgtgcggtgctgtcctaccactggtctgctgcaccagccctgaccccagcgacttcaacaccgtgctcttcacgcctcccgaggggttcgcgcgcggcaaccaaggcccactctcagaggaccagctgtgcgatatgatcgaggtctggacggccatggcttctttgctggatttcctacgggtgcagacgtcccatgcgcgccggtatggcgtgtttagcgagaccggtattactcccggagacaagcagcaagaagagtccatgctaagtatgttccctctgctttcgattattcgccccctgacacatctgacatgggacacattaacttacctattgtataggcgcctggctcgactttattcttactcttgggccggccgcggtcttggagctggcgcaatctgggcgcaggttcggtcctgaaacggccttcgcccacgcgaactcatatggatggacgcattggaccccacccactttcaaccctagaagcccagactccgggttttttatttcggctgtcaaggcccttagcagcccggtatagttctattgggccatttaaccgcgtggtggtcaccgaagtgtgattcccggtcaagagatatcatcacgatctataggccattcacgggctgaagacagggcgctgcagacatagaattgtgtatttatctccgacacttctgctctactcgaaagtgttgtttttctttcctttgtgcggattattgcgcttgttccttcttttgtttcggggtacatattgataactacataccctactcgaactatgttcccagacttttccacttaagaaaatgggagctacaaaagttcgtagcatacatatcgtgatgatccctcctcatctagagactgaacccatgcaaggagtggaaatgccgtcgttctggagaagcaaggcacgtagcatcattcatcaggaaggacgttgtagattttagacttattgatatacacgaaggtagttccctcgtaaggaagaagagccaagattggaaacttgttttgaagaagtctatctagtatgccatacaaaacacaaaggtccaagggctcggcgaatgctctgaaacaataatctatcgcaaaaacgaaatagtccgtggaatttcgtgtaaggtacagctgggacagagtctgagcagacgattttatctgctgaactcatgcccaagataatggaacttatcccatcacatatctcatctcatacatgtcacataaagaaacgccatagctccgtgatatcaacaccaaagaaagccactgaaggaaaatttaccacccgggaaacggcgccgtgatggcgaggaacataccacgaacatcaaacttccaattagtccagggaaaatcacttcactcgcgagcgaaatggaaccgtgatttgcttgagaatgcaatttgcacgagagactcgaccgtattattatcgggttcctccaccgtcaacactattttggcacaccgtttcccacgagtcacgttttcttgcaaagaggcgagggtttgctcttctgtgtccatagctgatacgcttaggtcgtcgcaaaagttgtctccttgactgtagtcgctgggcatctcttcggttggtgataacaaacttgggcatatgcagtctttgccgcttgctgcatccacaaagccaaaattatgcatgctgtccggtgggatgctgtgaagttctggcaccataccattgaggaacaatcccatactatccgtctcgcctaccgagggcagtccccatggatctcccgacaatgtgccagccatatcccatgtcccgtgcataaacccattatgaccagggattccttgagtcgtcgatggcaagatgtctgtgggatttatgttcatcggcacatcatcatcggcaatgcgaggatcatgtaacccggtgcttccttctgtgcttccactcccaagaccgctatcatcgtcgctactgtcgacagtatctcccgagtcctcgcatgagctcggcgacaagctcgagtcctcgggcccagttcccgcgctcgcggcagtctgagcttctcgtaagttcttcagtttattgtatcggcgggtaagaattgtgtgtctgatcatggtaccatcaggtcagcttcatgtcttgtattctacccttcatccaaggctcatgcttactgattcttgatcgagtttcgtgaccgggtagggaaatgctccatctgaatctctttccatcgtcgtcccttggcagcacatgcctccatcaatcgtcggttctgttatcgttcttattagcatcacaattctcgactctccgtggacatacaagcctacctcgagttctgtccattcactgcggtcgagttgtgggtcgagacattgcttccatcgcttggcacattctgaatacaacattcgttagtaatgaacagaggacacaaaaatcatcaagaacatacgatctgcgcttcgtgttttgacgacatccgcaaccaccgtccatctatcgcagtcacgtgtcagtatagggttctttccctgacgagcagcagaggatcctcacgtctctccatgtatttgcaccgcgtgtgtcaacagcttgtcttcctcctctgtccagtaccccttgttcaaaccaccggaaagcacattgtgccaccgtttgcgacaatctttattcgtccgacccggaatcttgtctgctattgatcgccagtctcttactctgccttcggatactagagcacggaatggagttagacctaatatgtgtgaaacactattgcgacccaactcacactgattgtggacttctcggcagaggagcttgtcctcctctggggtccatttctgtggggcacgaggcatgttgcggtgaacaaccttccacgtggaagtgatgcagaaaggggattaaaatggggtctatccaagatgaaaataaatcaacaagggtgaagaagaagagttaggttgatcgcccttttcggtcagtgcgatcacagtctattttaacccgcagtctgattatgcgcagagagttgacgatttcgaatctcaatgcaaccaaaccgatcgcagacaggcttcggtttatattcttgttcaaagtcaattgtgtatgcatttatttaattgctgactgcatttaaaaagtaccagggcttgaacccgctcgtattggagtgttaattagtacccacccacgggggcgacttggattgcgagatgactgctgaagtgacaaaagaggaaaatggcaggattttaagaaagaaacaacacgaatcatgcaatttaaccaataggacctgatagactagagaaatcctttcacaagggtttctcccgcatccttctggaccttctgatccaccctggcgtgcgccgataagcttgagcctattcgcgtggctcggcagcggcattagtgacggaagagattggacatctgcccaactccgatgcatacgatatattaccctgcgcccagcaacgcaccaatcaaatatccctgttatagtttcaatgggtctagaaattactggggtgactgaacgtcgggtcgaccacgagttaccagggtgcaaccgttgctctacatgccgttctgacgttccctgtctgccgggtataggaaaggcctgcagagtagcgcagttatgcggctgcaacaactatcgcccagacatcttctgctagatgattatcctgacaagaaaatatctgcggtgcgggtctcccaaagtctccccaagcttcgctgggctgacgcccacataacttactgcagctgattcttcacaaatctatctagacattggctggatgacactggcgatccaccttctcttagtctgatccttcaagctaccattacttgacgataccaagcctgaaacacaatacatcctaccgaggagggagaacgttatgttgtatattacagtaaggaaaattggaatctacgaggttccgtggcagacgaagcaaatagttcgcttaacctgtcgaaatcgagtgggccctaatctgttgagcctcaggtggccatgcctgcttgccatatggcgagtgctgttcgatcgttccagcatcctagcaagtccgtaaagagtagaaccggggactttccgctgagggtccatgcagacacaagtttgagatcaactacacaattacctagtcaaggctgaaaacgctgggctatgttgatcacaatctgtctcatgtacatcggcttgaaccgccaatgtctgtcttcttgacgaaggttatcgacatctccatgtggccgattgacaggaccatatggtgccggaataatgtacctaaaaacagatgcatgcacacgatccacagctgggacacaatcagaccaataagatcaacaaggccaaattctctacaaggaatagggcgtttttcgttacaatgtgatcgacacgcttgaggttttgcaacatgaatagggtcgtcgagtggttctatacggttgtacctgatgagccagaactaatggacttcgctggtgtgatgtaccgggacggttgatccacattgtaccaaaccatgataggttagttccaatgatgttacctgcgactagactcttttggctgataggaattgtcggcggtgatacgatttcaaaggagtggccgccttagttaggctggatattactatctagacggcgttgtccgattcgtgtacatatgtgaacaatgtccgcggacatatagttcggccgaatgcagacaacagagggtttgcccgtcgagtgtatttactcccgaatttttgacatacaatgactacattcagtggtatatggacaagacaaaccaagtccgggccatgtccaaatacctccgagagtggttcctgccaagcatccggacgatcgaccggcttaactggcaaccgcaaaccgattgcccaagcggctcaataaccctcctgtccaggggtacccacgatctccgacagcaaagatagggctaccggttgaaccttttccccgcgttgggggagagggcctgcactatttgactcggcaggatttggtctccgtttcgctgcagggctgatcggcatctccactttgctcgggtcctccaccaataatgccgcgcaggctcaataaggtacgaccaaaacgcgccgaacatccctgcaagtgcttcagttctccggcttcatgtccccatgcctggtggttgacccggcctctctacgaccccgaccaccgactgctacctggatcattcgacctatcgtgattctatctttagtctgactgagtttgaggctatggatcgaactgacacccagccattcaccatcgaagctgtgaccatgttgtgtctgtatctcaagctgaagaaaatcctgaatcttactcggcagtatcacgctgcagcagcaattaatcccacggaagatagccgaggtgaagagattctagattgtcatctttactttcttctcttcaagaacaaataaaaagatactttgatcttcaaagtggcttcaagctagtgatagcgtgagctgcagtgtcactcttcagccttcactcggaaattacaattttcttgcatgttacactacattagtgtatgagttgagggagaagcaaacgggaaaatgtgggtaaataagtatgcatggcttactgcaaatggcaaatccgattgccgtgccgcttaacgttctcatcagtgtcccggcaaaagtacatacttatctagtgaattacattatatagatagtcgaatgtagtatactcgggaatttgcgttaccaaggtctcatcaaaggatcgtcaaagaccgctcatcatgacatcgactttagctgaaccgtttactcagcgataacaacggctgtcatcttgtgatgcctatgaaggtagtatggaaagttcaagtatcgaaagcacgaaatattatcctgtctgggatgttccttcttggtctgctataagtcacaccctctttatatatcaatcagtctttgacattgttcgcttggttgccatggttatactctcaaaagccgaaagcgatgtaacatgtatgccttcacatcccatctaatccatcataacgctgacccgagcaccacactagatgaacaagtgcacctagtatatgggcctgtatcgaaccggcggtcggcattacagcagcatgactaccagcatgcgcctgctcctcagccgttacccgcgtattccgtggcagaagctgtccttgcgctctagtagtcccagtcaggagagagccagcagaaagcagcccgatataaaatgcactactattgtacgagtcacgagtgaaaagacggatacaagtgtagggagcagatctcagagtcactagtctgtataaaacacgtttctttataacggctgggcttaaaagttgccaggtataggctgataaaatggtgcagtataataaatagccattcatacagggcttgacttttatatagcaatatcttaatatactcatggctccactcccacactgcacttctttgtactgggtctgttcataggtgatagcatgctatatgtatatctggctggacgtgtgcttcggacttttctgtgcacctacgtaggcgtataagagaagccccggtcaagaagaaccaaataggactctccttggaatcgtatctcttatactgcataccggtcgtaagtttaacccctatcatagcgaaatataccctgccctcccgctaggacactgcggactcttcatccgggagcagttacagttatacacacgagccttcaacattgtccccacagactcctttatatcgacaatgacctgggtagatagaaatgcgccatattcttggatacaccgcgtcaaacgatagctcagcgcgtggcctgcagtacaagacctcccagcggtctttgtcgaagggggtattggttacctcaaggtgacgagatctctgtccaggtcgagcatattggcagtctagtgattaagatgtattatgaaaattgatagataagattaatagagagaaagtacccagaatatagcgtttccagtaatgtcatctgtgagactgtgagattttgggggcaagtatggcgaatattgcgaacatggttgattatataattgatagaacctagtaaggtgctttagaaattgaaaacaatgaagcagacctttgacagagggacacgtctgaccttgtgcttctatgttcaaaactagcaacatgcatgcatgcttaacaaagctatcaggtgagtccaaaaatcctgcggcggcgttgatccttacctactacagatgcattctgcaagcacgtatttaggtatggttagatagttctatccaatagtcaattcggtttcttgatctctttggtatgccctaatacacaatcaccaagtgcttctacaattaatttatgcataccgccgtaggtcaacgtaactaaccgtataattgtttctctgagtgggggaaaatgcaggcgccgcatttcttggcaactaatagctaggtcgagtgcaagggactcctgcagataacaaagcaatagttcttcaagttccatgaaaatcactcatcgatcttccattgcagggttggatctctcggagcagcatggaccaccccggacggtgggccgctattggcgtgtctgttgtgctaccgccgtcgatgaggtcgacgaccggttagttattcgtcacctacagtgctaatgcaggtaagtgggtcagttattggttaactatatatgatcgtgcattcgcaataggcaggtcgctttactttgggccaagtgtccagatgggctgagaatattcacgtggcatgtcttaaatgagtgatgccctaattcagctccaaagatcggtcgagattttccctgattatcaggccgcgctttaaaccggccaatgctgcaggaccgatgtaacgaggcttatgccgtagtgcagaattcttttgtataattttgatttatctggcactgtgctggattgtcaaagcgatccttatttaagatacactccaaaacaatgcgagcgaattttcgatagcattacaagggactatgctgggatggtcgaattctgggccatgacaactaaaagctcgtggataccactctgcgatagttatttatttccaagaagagaccaaatatcgtgcattatgcaacatagagcgtgctattgacgcatgagggagaagcaaaagcctccaatagtacgtttttccggagattaaaaaagaaatgtatcggagtggggcagataaagtggcgtagccagtatcagcgataatataatagccagcatgttacgatcaagatcttgatttttccttcgttcgaactcttgcatccgcttcaagaagtttctcgtctcaaatcatcctttcgatgagcactcatgaccatccctgatgagtattagtttgagtccgtaattctgggacaacacgcagttaatatttttgtgtcatggcggccataatctgcagtacttctttaggaagaatcgtccattggctttctggtggccggctcttgagatttcctgaagaggagcctggattctgtctgtcaccagcatattccacagcgacgaggtcagtgtgtcttttacttgatctcaagtacttatcgcagaagtataagaagctgaatctcatacctccagggtcgctggcagcgtggaatcagacacgtacgacgcagaatgtgaaatttctgatcagaaaggtccttccaaatggctcgttccggaaactaccactgacggaatgatacttgtggattggtattctgatgatgacccggcaaatccgcaaaattggcctcgctgggccaagatcatgacctatattcagataaatttttacactttcgtcgtgtacatgtcatccgcggcgttcaccccagcagaagtggcatttcaggccgaatatggtgtgtcctcatcggtgggctcacttggcatggccctggttcttctgggttatgggataggacccttactctttggccctttatccgacaaaccgtctataggccgcaatccaccctatgtaatctcgttcgcaatcttcctgatagtcagtgtcctcgcagccgttgtcaataatgtccctgggtttctttttctacgctttgcccaaggcttcttcgggtcaccatgtttggcaacgggtccggcttccttcgcggacatcacaaatcttgtcaacctacctagcggattatggatctggggggtatgtgcagtgtctgcccctaccgtggctccaacgttggcaagtttatgtgtcgcgtcaaaagggtggcactggagcatgtggctgatcgtctggtttgccgcgccctgctttttgcttctggttcgttattgtcctgcccaccacattttgcggacttctacaacgattcgcgacctaatatccatcagatttttctaccggaaacgttcggcccaactattctataccaacgcgccaggcggctacggactttgactggcaatgaagcgttcagatccagttccgatgtgaaccacacggggctatctcaagagacattgtatgactttcttgtgattccatggaagataaacgcctttgatcccgccattctgttcactacgctttacaccgcactggtttatgccattttctattccttcttcgaagcagtccctctggtataccaaggtgtatacgcgatgagcctactacaaaccggcgcaatattcctaaccgccatagtggccgtgttattcaccacaccattctacctagcgattactcactacacaatcagccgtccagtcaaagccggaaaaatgccctcgcccgaacaaagactcatacccggactcctcggctcactagtcgttccagcaggaatgtttcttttcgcctggacttcgagcacagcattccattggattgtacccactataggctttttactttttatgatcggcatgcccactctcctccagtctatgttcgcctacatgtctgtctcgtatggaagatacgcgggcagtcttttcgctatgaatgactttgcacggtctgttcttgcctttgcgtctattctttggtcgacgccgctttatgttaatcttgggattgataaaggtgcgagtttgattggggcgttgacggtggtgtgtgtttttgggatttttggtttgtactggtttggggctacattgaggaagcgaagtcgttttgcggagtatgagacggattaaggtttatgattatattagagaagctgttctaatcagaaattgttagagttgggcccataatggaattgttcatgctacggatcttgttttatatgccacaatgatcgtcaggaaaacatcaccgtgccatatggtgcggtatagccttccagcctcggtgagaaggtacccttactgtgctaggatatatgcgcaataacaatgaatcactgggggaaagattgcaagtcctatgtggtgccacgttatccttgtgttcgatgcaaacatccccatagctcgatccacttccagagtcatgacactcctaataaggccagtgtttcctagtcctcaggtatcacgacaactaatccttctgatagtcacccacataaatgagtcaaattcagtgcactctatgagtatatcaaaagtacaccgcgccaattcaacgcaagggacctaccatcccctcacatcatcgcaatccgtcgacgcaataatctccctccaaccctccaacatctcctgctccctctccaaactgcgctcaatagcagtcaaagagtccttccccagcgccaacctcaccgacaaccgtcgaccctcacaactccccgtcctcgtcaacgcctcaaaaagaacccgcgcccccttcaccggatcccccggctgcctcaaactatacgccgcaagtccatcgcgcgtctgccgcgtactaacatccagctcgggaatcctcttgctggcaacaatcttatgatccccctcgaggaaatccgtccggaaataccccggctcaacgcacgtaacgtcaatattaaaaggaagcaattccgccgccagtgactccgtataaatcgcaaccgccgctttactagcacagtaaaatccagcagcaggcgttccgttccaaccaccgatagacccgaaattggccaccacaccggatttccgagcgcgcatggatggcaggactgcgcggaggatccggatctgggagaagaggtttgtgtcgaattaggtggtgatttcttcgttgctttagtggtttcagtatatggtttgtggggaggaatgtgtggtacggaaggaagttacctgcattcctcgacggcaccttcgaggatgtacccgatgttgttgacgaggatgtcaatcggtccgatggtggactcgacgtggtcaatcacggcttggatttctgtctcgttgtgaatgtccagcttggtcgggataacgccaagtgatctaaggtcgtctagcttggatggatcgcgagaggtggcaacgaccttgtcgccgttttgtgcagcggtgatggctaaatgacgaccgaagccggaggagcagccggtgatgaaccaggtgcgaggcatggtgggataccagattatttatcgctgctgattacaagtatgagtcactgaagattaatatgtcattaacacatcaagggtactctgcgtggtatttatattatagcatgtctaattgtagctggccttggatcactccgatacaccgcaactgatcgggctttagggtttttatcggagttggatgaaccaatctcgggcgacaaacgccggacacaacgttggtttctcgagttccaggaacttgatatttattaagactatttccgttagttatactttttcgtgatcaaatctgtaacgacgaaagtgctcctcttcgtccggggattgatacactgcggtccgcatacgacggggaccgatccaaataagccggattagtgtttgtccaattggcacagtcttgcacacagtattcagataaaatccgcgaggactatgttcatagtataatacacgagcatttcggtgattgtctgatggttccttgtagagccgaagacaatacaataatcgcaccatgacaagttcacgaatcagcccagccacacgaatccttccaagaatcaaagatcttctagaacaattctccctgaaggctgcggacagccacagcttcggagacagatcccactccgacccctgcagccgagggctgaaacccacgcaacctcccgaagagcgtggcgccatggtttacgaggttccttctcgcattcgagacagtgatgagtcaccgttctagaccgacagagttctggtctggtcaggaggcgttaagacaccagcggatcggaccgtgaaggttttgcacatgggtatttgataagatcgtcgccatgtggttgatcgcatggacgtaagacatgcaggctggatagtttattttgactgttggtggcttgtttactagcttttgtggtatgtggctctggtttctttcggctacttttgttgttactagtcgtggtaattatcgatcttctgagtgggtattttgaggtcatttcatcctaagtctggtgggatgtaggtatgtgatgagatggttgaccattgggtcaattgatactgacttgcagcccgacatcattaaacatacaacatactaaatggtaaataactgtcaagcgaatcatatatttagattgcaaaagacagacacacaagtgaaatagcaaaatcagtgatatcaatacgagcagtagtatatacaatttctcatgccagatgattcccctcctcgctatcaggtcctgctcgacaaatcgggtgggggtaaaagggcggtcacttgcatgagagaagacactctccgattgaccatttgatgtataacagcctccatggccgtgtaaaaaggtatgtggggtgtatagaaactccagatttctgacacaatgcgacgacccgcgttctagcaaatcttaataaacgccctgcatgcgagtcaactgctgcctataaggattgagtcagtaactagggtatcatcatgagatccgctgagaaaacagacttacatcgacttttccagctggtcgagacggtggccgtgttccgacatggtctgctgcacacttcggagagagttgaactccatctttttaccgtacgggctttcttgacgaggggtggtgtctttcctattgcagacaatttagtcaatctctggttcactccataattccacattccattccatgctgaggcatatctcgtcggtgtcaatgacgtcactcccgacgtcaaccagaagaaaggaaaaaagggtcaggagaaaagaagacagaacgtactccgcgaggaacccgcgcggcttgggcatgtgcatccactcgttggcaagtctggccgggatggcaatcgagaaaggccgcatggtgttcgacttgctgcgggcacgggcgaggggacgcgacgcttgcatgagggtggacatgatgagtttattgcgataagaggtcgattgaactcaattaaatcaggcagagatattgtagatcgataatctacggaccggcaatgctccagatatactatccccgtttgacatgtccagacgaggggtttatatactcgatgctcctgtcgggttcccgctgtccacgtgacctgtgcgtggcccaaagcggcgatgaagccctcaccatggatcggatcgccgcagctgagcgtttggaaagagaccggaccagagtcgtccgtggcctgtcgaacgaatcatcgctcgtggtcgatcatcgtttccccgggtttcccctcctccacctcatgggagtgctatgctccacccatcacaacaagacctctcacagagcacgcaagggatgccttcaggtgcaatgatatcatcggctatcagaggaatgcaccctttctatggttgcctattcgcgaataaacatcagcgactgcgatacacgtctatggcctgcatcgccacggctgtggcgtgtgtgtatagcagtaccacgtcttccaggttggtcaaaccaatcgatcaactcaacgaagggggtgaatctggatagagtcccacgagcacgcattcaaacagctcatatccccgcatcaagtggacctgatctcatgcaaatatggcttgattggcagcatggaaggttccacatcgcccctgtttgtttgctgtgatcgacaccatgaatctgggccgaacgggccataccagaagacggatgcctcaaaaatggatctctccgacggcgacgctgatcggtccagatgaataccgttccgcgcggcttttacggtcgcaagcatacaccaggccactctctcctcggcatatgagcattaaatgtttattgcactgcatgcgttgggtcgcctgaaatccatgaccccttcttacctcgaccggtttgacatcgttgtcttgttatttctaatccgcgtcacgccccgtgtacggttcattaatatgagttattaactcgaaaaattagattcttaaggaaaaaacacgtctggctacacttgaaacagtactaaaccccatcagatcatatatcggaaccccttttgcaagcgtcgcgccgctgcaatatcgatgccctcgatctccgccgtcttctgtaaccgttcgagttccttcggcgtcaacgtcacctcctcgtcctccaatcggtccagccgtttgttcaagctccgcaggtggaaatacatcaagaccgccatggccagccccaggacctggagaccgatacatgtccccatcgccggccggtaatacggatagtccgtgtcgcggtaggtatacggggtccagatactggccgagttgccgaccgagttgatgaaggcgtaggcggcggcgcgtttggccggcgggcgcgggatggagttggcgatccaggagtagacggtgccgttctgcgcgaagacgaagatcatgaggaagaaggagaagtaacgcgggccgaagccgtcggtggtcatgaagacgacaaacccgacgattgtgatggggatggggtagacgaagaaccagaaccgcctgccgaagcggtccgacaggtaggaatgggccagactgtacgccaccatgaagatgtagggcggcgccaccagcagcagcgagatggtctcggtgtagcccagcgtcttggtcagtgtggggaagaagttctggaagccgctggcgccggtgatggccatgtacgcaagggcgagcgcgtaggtcttgatgtccgagaaggccagcttcaggcccttgacctggctcatcttgccggcttcgtcgacgtcggcctcggccgcttcgatggcgagacgacggttggcgacgtgcttcatctccggcgacaacagcttccaggtgtcggggaagtcggggagcagcaccgccacggtcaagccgacggccatggtgatggcgccctcaataatgtacaaccattgccaagcggaaatgccccgatggccctggagaccattcaggatcccggcagcgatgaggttaccaaaggcgccgctcagcagggagccggagtagaagatactcatgcgcagggccaactctttcttcgtataccacttggagagataaaatagcacgccggcgaagaacggagcctccactagacccaggataaaccgacaggcgacgatacccccatagctctttacttggctggtcaacgtcgataccaggccccaggcggtagtgaaaaagccgagatagagcgacggtttgcccatgtagtttagaagcagattcgacggaacctgcattagaatataaccgacgaagagaatggacaggccggtttggtattgttgatcatcgatgtgcaagtcgtccattagaccttgcaatttggcggcggcgtaattattcctgtaggctctgggttagtctacacatattgccacgtcgtagcgctcaagcaaaagatcactccacctaccgatcaatataattcatcaaatacacgagaatgaccaacggcatgattaaacaatcaatgcgccgccgcagtttcttctcgatggcttgctcctcgggcgtcaactgggtcacttggaccacctcctcatgggtgatatctgccttctcgcccatcacttcatgatcggtgatcttgccctcgtccatgatgagatgtctctgtcaacaacacagcagcaatgaacgaaacgatgtaggaaataaaatggatccgacctcagggtcccagcgaacgctatataagcaaatcacccagcagggagagactattataggatgacacggtcgcaaacgaccatcatgcccaacccactccacccaaatcccggggtaggaccagccaagcaacggcacaagccgacgtgggggtgcctctccatgtgcaggatgatctcatccggggacgagcctaagggcaaaaaagctggggttgaggaatatacgatcgactcagcacagcttcgaccaatccgcatcgtgactcccccacgcgggcccaaagtccaatgccatgctttcccatcttgagcatagactcggagcatgaccgggggatcggccagctttagagttttggcaaaaggtggggaaagagctttcctgtgtagcttactgcagtttggcacggcatttcgttgagattgccctctttaggctgaatggttgaccctggagaacttccgaggttacgctcgtgtcaggccatgcggcgtttcttggctcgcaggatctccgtgtcttggactcacatcctgagccgtgtcttctgctggtcgaaatgcatgatgccagttgagctccaaactaagtgcttagtccatcggggggatcactaaggtcaccgaatctggtcgctacggccttctcgaccagttacagccgactccagccgtctcataaactccgaggcatggattcgggtaagagatggctatcgctaaagacgagttctcgagagcagctaccacggagagtctgcattgtatagaatcctttcatatattgcacgtgctgtcgttgccctaaaggtttgttcggtatagcaaacatcgaagtaaaaaaatggaggcaaaaaagatggagacgcggggaatcgaaccccggaccactcccatgctaagggagtattataccactaaaccacatccccaattcgatattcgacggtacacgctttgacaatataagtcaaaagctttttttacctgactctgactaaatcctcctcgatggatgatggtatgccatgtgtcgaggagattctgtggatcaatggatcatcctgcatgtttctactgtcatccaacattttcacctcgtagactctgccctttctgcctggtcagagtcgttgagtttcttctgacttcatggaaatgtgccgttatatatataattgtcggctctacccgagccaagtcgtctatctccaacctaaccgaggacacgatgggttactttcaagttcctacatgacgtactcaaatggttcactaaggctaaatgacctcagagggaaccaccacaaggtgaaagagatatacagtcctggtgcagcatgtcctggctagaaaatgacaggtaattttcgctcttcaagtgtctacataatctacatacggcgggctgaaacgcgaccgatcaagtatgaacagtatgccaatatacaaaaccaaaataaacctctatcccaaacataaatcgtacacgccgtaaaaacattgcaaaatgcaaaccaagagattagaaactgaaaagaccgctgcgtcgttttccaaaggggtaaacgaccagagcagcaatgaacaagccgacggtgataccgatggcgacctggatcataccgaatcccaagctggcgatcgatgtatcctgactagcactgttgagggtgtcgctgctgttcgatttggctagattttctcgtacctcgttggcgtacgtaataccggccatcagcgagccactcgaggccaagccggatgggacgagcacaaagatcccgggaagaatggcagtggcggcatgcccatgccagagtcgactgtacaagttgccaagcagcccgaccgtgaacgcacccaccgtattggcgacttccgaattggagcccagctttttggtgctgaaataattggtaacgtatccacaaatcgctatgacgatcattgtcggtacctgcttccacttggcttggttaatgatggcgaggaagacgacgtagaccggcacgaagacaaaatgctgaatgtactcgctgccccacacgtccagccgcttgcacgtcgtctgagagttggcagcaccatcgagaagcccgtagattgtcgtgcccaccgtgattccataaccaaggaagagcgagtaaataatagcgtagaccatacggatcgaccccgcaatcatctggtgtgactgcagttccagactgctacacagcaccatgaaaccaggaaggatgagagcgatcgaggattgggcgagggccgagaaacagaaaaggtactcctcgcccccgaagggagacttgatggagccaaatgcacgcgcgaggaaggacgtcaaaacggccgccgacacctcgaacacattcgaatacagcacggatttgggtgctaggacatgttgcataaatccgaccagggatcctagaaagaaacagatgggcatatcaatcggtcgggcatcaaatgcgaatggacccacggcgacactagccagcccatatgcagggaccaagagccacttgttaaagcgcggagagcgctgcatgatgctgtccagttcctggctagcttcttcaacccctactaggtcgtggacaacgttcttatacacgttgtgagtctccgctaggcgacctagatctacgccctggaccatgcggacgagcttgacctcagccgtgcgggtggtgggatcatcgaaggacatgatcatgcatcccgggagatacaagaattggccttcgacctccagcacacgcgctgtcattttcatgtactcttctaaacgatgggtgggcgcgccgtaacgcatcaaggcacgacatagctgcatgatatagcgctgccgggcaaggatctctgcgatatgcaccgtcacacgaatctcgtcttccaagcgggtcttgccataggccttcttcttacgtttcttcggggtagcaaacgcaagagggtccgctgaagcgggaaggctggcacgactcaggttcatcgaggcttctactagagaagctgtcgactgatggtgcggtttcttgtaccacttcaacttttcccgcttgggagtcgccgccccagatttcggtgttgcggcccccgacgaaacctgcgattcactgtcggatgagtcggtcgtgacactttctgttgaccccgtctgaccggcttgcaatttgaggagttgggacaagatgcctccaccgctaaaagatcgagacctggcgttataccatgattcagggcggcccaaaccctccggggtggtctgccccgaccgcgtgtaagccgatttaggcttgcgctggcgcaaggcattttgagactgagttactcgacgcacaaggcgatgtgcctctgcgctcggagctaaatcctgcttttcctcttcaggggtttcgtttgtgggcttcctcctctcttggatttcatgatatggcacgccgccctcaaggtcgtcgggtaaaagagatgctccgaggtcctcgccaccatcttggggtcggccaagccgttcgcctagtcggactgtcttctgacgaattagcttgctagcagccttcaaccgtgcgccaacggatggggagcgattaggaacgtcattgctgaaccttgatctttcgggatcgtagtcgaggggaacttctggggggctcgcgctgccatctcgtcctcttgccaatgtagtgggttctgcttccgcctctgcgcggagggcgtcggataggtcggtcgaacgggcggaagtgggattgatggagtggaccgacatgagggtttggtctgaatcgaaacgagccattgagggtcgaacgggtagaggggcttccgattcctgagcatttgtagactgaaatctcactctttgagggcgagagtgctcattcagcgggtcgtcggggcgtagctcggggctaggaggggaaggctgctcgacgatctgatcatggcgatggtctgctgtatcgggttgctctggattgacttgggggttcagccattcgtaagaatcgctgccctcacgggaatgtgacattgggtggtagagcagtccagctgctgaagctcaaagctttagagaaagtaaaggcggagaaaaagataaaaagagcaaaaagagagaagctttaggcggatggtatgtttgcagagcgaatgttgtcggaggcggataataacgagaggcagtgaaggacaattgtgaaagacaggacgaggattaaaggagcagatagatatccaggcacacgagagcaaaatttcacagatatatggcaccgacaatggcattaacggcgtggaaacgtgggtggagagattttgcggccttggacggaggcgaaccaaaaataagttgagtctagaacgcaaaacatagtttggaagggggagaagaagaagaccaagaagaagagacgggagaaaagagtgcgaaaggcgagaagagatcgaccgtgatgagccgaggaggtggagagccattttttgatagtcaaaccatttgaccgttagttacttcattctagtgaaggtcaaaggtgggaaacgtgccatgatctcatcgcgagaagaattaacccggtgtattggacgataatccccgtctgcgagtgaatgtcaaaaagtggaccggtttttctgcaaagtgtcagtctctcgcataggaatgatgaattttggcgcggtggacccaccgagagtatccgtccgtctccgcctggataagtcgtcgaaaagtcattggaagacgaggattcatggaatgatggtggggacttgtgagatatactccgtagagaaagtcaatatagttgtgggcatcgtgggagtgagaggaggaaaggaaaagaaaagaagagaaaagagtgatggtggtagtggttgtgatggcgttggatcggcagggaatcaaaatcatcctaaatgggctagcaggtgttgtgactgtccgtcaatggcctcattttccaggcctccccaaaagcaaagcaaaacataagccaagcaaacaaagaactgctgacatggataaccctatcaaaaccggctttggcctccacgcaaccctcgagtggatctgccgggatggacactgacagtggatccccttttcacggtggcaatgagaacaacttccaatcaggacgatggccacctcatgaccgaccatttctagaccaacggctgcgatcgtacatgttccagagccatttttcccgtcgtgattcattttcaaacgtcagcaacagtgtgctctatccgactattattagaagagaaaaacaaaaaaaaaaaaaagattaattattgtctttcaatatgccatctgacgaccatcggttagttgtgttcgtctagtgcgattcacgatcccttggcaaattccatgcagaggatgaatatgcacatacaagagtaccacaggggactcaactgatcgttttacgatacctcctctctaaaatccgacttcacaaaaatgtagcacctctcaactggtccccactggcaagtgtacagagtagctgctaccttatatcagtacacgcatagatggggacacgtaaacaatcttgatgagacttattctatcaaagagagggatatccacttttttttccccccagctaactcagaatataggggaggcttggcctcacgaagcgatgggtctggtgtgtaccccgagattgttttgctttgttttttatgaatcgtcttccaaatatttcccttcctggctcgtatatgtcttgcttcgttttaaaagcctcagaagaaaaaagggatccaaaccgcggaacttttctcagctgtcgatctcttgcacacttcgcgccaccagtgcgagaagaaaagctcagaaaaacacctagggacatgattcagtcgctagaaaccctcagactacagagtactagtcctatcggaacctatagggttgcgagccctacaagatcaatattatcgtactctgagcacggtatttcatggagtgaatccatgttgaatgacttcacgctaggtatgctttgcgcaggcaccctaactcgccatgaaggatcttgcgcctgtacaaaaaccttagtcgtggttgtttcaactactgaatcattgcggtgaatgaatttagagataaatgttttggcggtgtacgcctccagacgagccttagagttgatgcccaattggacaagccattttggccgggttcgctgggttttagagccccgaaaagatggctgactacattaccagatcgggcaaagaaagacatcttcaaacgctctctaatttgagggcggaaaagaaatcacgaggtgttctctctcgcttgctgtagtatacgagaccgggcctgtaggaggctcaaggatgcataaaaggagatgaatggtgcccggctaagacatacaggcttctagaaacgcggtttgccaaagccgcccaccgacagtggaaacgatttgcctagatggtaggaatatgatactcacccaggtccttgaggccagccattgatgagcggatgggttggtaccatgggattcatggcttgggggtttaatgcgtcttcctgggtgacctaaaacctgtccagagcccaacgaaggcctctatgcttttgcttttgcttttgatgatggggttgtcatcatatccactaccttccagcccaataacgcagaagtagtcatggtgtctcatgctcctgtttgtgagctgcttgaagaagagaacagtaggcacgtgtgtctcatggcgatcctgaaacggtgttctctgtaggtacccgcgttgcatatgggaaattaccagaagatgactagaagccagaccagcctcagcaatccagcgcaatctcctcggggaccttaggctcactatacttgcccctgtctcgctcaggaacaacattgcctattcccagattgggaagagggtataaatgtttccttctcttcttgtcagaatctgagctctctcaagaactgctctctgcatcgtgttctaatcatttctttcgccctctctttcaaccccttactttctatcaacgccttcttgcagtagccatctccctcttaaccaatgtcggcgacctcatatccacctgaaaccattggtgatgtcgtcacgtcatatttaccactcgccacaccgtggagatggaatcctgattgcttggacagctttataatggatgatgatgatgatctgtgggcatatcacccaaaatatagttctgttgcctccgcggaacccccatgtatgccactggaatatgaacagtggtttgacgcaaatattgcacagggaaataatggtcttgaaaccaatttccagcttggccctctggctagccctactaacgttcctaacatctctattgcatcaacttctgtcaaataccagtcgagaaccttatctgcttactgtcccccgtaagtgaggcccttgccagttatatccaatgctaacctaggttagagagaatacaccctagtaacaaggacttcccgagagtgggcatcccccattcaaggtggaactccagttgcctactggactcatgagtccacggggtgggccagggagacgaccgcatttgcagacgttacgaatgtccatgcatatcctgtggttggttggaatatcaaccgccctggaattggacccgccacctacgccaccgccactgccactgggacaagctccttcgatgcagcatcttccacgtcaacacatgcacccatacctgcaaacaatggtatctcagcaggagccaaagtggcactcggtgttggtatcagtgtggctatcatgggagtcatggtgggtgcgtttcttgtcgattcacgattaaagggacatattgaaaggggcatcgcaactataccacatccttggagatatgatcgcgaacccagcgagttcgaggtgccgctatactctccagggggtactccgcagcaaccactagcagagctatctgcggtacgagacccagtggagatggaagggtagtcaatcttgtgtctggtgtgcgtgtgcatctctatggttagattgtctgttcatgaccagttcctcttttctttgcttgtgtttctttactggcttctcctttctcctagcattctttctgtattatcccttattatttcttctcgcattccccttttcgtatgtatgtttcttagacatctacttgggcatttgactagactatgtgttcgtagcttgttcctgttctgttcttttgtttgtttctttttactgatttctcctcttttcttctatgctttcctttctttctctgattgttctcgtatgtatgtttctcagtagtctaaccgtgcatttgggttttacctgtttgcccgcaaacaatgacccttagagtccccaaagatagacacaagagctgggtactcagaaatggtgggattcaatctgtgtacagacttgccccggtgccgcatctgattcgcttacacgaatgagtagagagaagaaaaaaggggattgcttatactaaaatcaattgcttaagataaggcggcaatatctggagcggagtgcagtgagagatctaagtatgtgatactggtggaatattggacgtatgaacagcacttccatgaaaccggggaagatgatttaagaagttgttattgcaaccatacctattcacggtggtcttttcatcttgatactgtaacaccgcaatcgttgagtatctctatgcagtgtcatccgtagcttgaaatggccatccgctgattccatttcaagatagtgaaccgccacgaacttgtgtagagatgaaaacaggaagacggcgagcaattgcctcatgatggcgccacgtggaagagccatggctgcgtattccgtttcatttgcccgtgcgtttttctttatcccatcgtggatagagataaagcacggacagccgtacggagtagatatgccaggaacaattactggaggggacaacggggcaccgcataaggtttatggaataaagatgctaaaaccagagggcttgacccaagtaatgctggggaactcgatttttgttctgtcttcaaccgacaaagacggcctccggagtaactttccagggcgcttggtggctctcttttggaagcctttgttggtgggatgagtaagcgctgctcggactgctataggctgagggatctatattttcagcaaccccaggctggggatgtggatctagatctgtgtatagagaaggttgaatcggacggggcagtatagaacaaacgtggactgttccccgataatgattcctcggtctgggctataaagtccctcgacgttgcccttgctctgatgtccatcacctatcttcaaacaaaatattgagacttggcctacaccttcacttgcgcgtggcccaagttgctcgcgatgaagctccatctggcttttctgtctgccttcgccagcctcgcggctgctgcggttgcaggcaacagccaaggtcagcggtttccccccctctctccttcgtagcttgtactatcttggcatctattgtcgctcatattggctgactgatattgtagatatagctcctcccttcaccgaacagcccggcggcgtggaaaaacgcgacaatatcgagagtccttcatcttcaatgtggagcatgcaatgcaataacgtctgtgaacgggacgtcgactgctgccttgaagataaatgctctggtgataaaagatgtgaagggtattggagtgagacattccctttcggatatcccctacacgaagcggtaaattattccgatcctgcagacgtagagaaatggtcaaggttgtcaaatagtatgttctctttcattgttctttacgttaatcctactaatcttgtatattcagttcgggcccgtcccccgttgcgaattcgttcccctacacctcctgtgggaaaacgcgacgatggaaaagatctttcacctgcggattctgagtattataagtctacagggctttggttcagcagagcatgtggtcgatcctgtgaaggggattttggctgctgcatttcggatacatgctccaaggataaaaaatgtgaagggtttttccaagagaactttccctttggatatcccttacggcaaaaggtaaattggtctgatagtacagaagtgaagaagtggtcaaaactctcaatgggtaagttctgtttattttctatatcaactcctctaatattttataattagacgaacatctggcccattcgccctctgcatctccaggaaaacgtgacgacgttaaggattctacgtttccgaagaatgagaggtcttacagcgcagcatttggggaaaactagtcaatagtgtgcgagccggtcattcatactagtagcggtatatgtgtgtctttactatcgcttgcttttttgttgggactggtacaagtctctagttccattcactggtgatagaagtatacgaatgggacctgtatgtgatggaactattatctgacaatatattgctttttgaaatattcctatagagactggttcacgatgcactaattctgggaggttaccacggaagcaaaatgcgtactgttgatattcttaaggaaatgttccgtggtgacacggagacctttgaagtcaaccagcatcgtaggcgtggcattcgtgcgagtaaaatggtcttcgatattgagatacaaatactcttccaactgactccatacctatcaccaatcagcggttgtctgtggtaacaacgccagcgattatgcctctcaaactactttgtctccatggttggggcaccaataccaaggtaagccaaatgcattgcatggccggggcttgtggcactcacctatgtgtgatagatcttgcagtcccagttaagtatgtgttacgatgccttagaatggaccaatcagcttaacaaacagatggtctaatgaccgatcttcgtcgcgataacacggtgacattccactttcttgagggagacgtggattcaattccaggcccggggatctcgggcttctacgacggtccttactacagttattataagtttccccggtctatttcggacaatggtgccgagggagagtctttactgagtgcgtacgaccgcctttacgacgttgtagacgaggaaggtcctttcgatggggtcctgggcttctcccatgggggcacattggcagctggattcttgatccaccatgcaaaattgtacccgcaagaactacctttgtttcgctgtgctatcttcatcaactccctcccaccattccggatggatccaggtggaactccagtgattgatccagatctgaatgggtacatcaacatcccaaccgtgagtattggcggggctgaagatccgctgcttgagtactcacttgcactgtatcggctgtgcaatccatccatgtcgacctgggtggtgcacagcaaaggtcacgatatcccagcagatacaaggaacgtttcctccatcgctgcagcaatcaggaagttggcggtccagacgttggcagtttggtgaccccttcactttagcttacgcgttctggcttctacctctttgtccataagcacgagatagatcctggaacgatgagaggaaagtctaatgcgagtcatccgatgcccaatagagtgattcggtgatcctcagctgatgtagttcgggacattgtggtgtgcgaccctcgaaccgggatcttaacggaattattgtacaccgtatatttcaaatcagttgctcctgtattgcccatgttccaatgtacccctatgtttgtgaatctattctagctactatgcatgggtcgctgaaccatcatgacggccgattcccttgcacatagtccacccgccatcccgactccttccactcaaacttcttcagaaccaacttcagtagatcaagatgacttgtccatcctatcagaagatctgtgcatgcccattgcaatcgttggaatgggcttcagaggccctgggagtgccacccatattaaggaattatggacgatgattctcgaagggcgggaggcgtggagtccaattccaaagtctcgatggaataatgatgccttttatcatccggaccactcacgacatggaacagtgagtacagtcatatcctccagacatttgaccatcttagagctgacaacaagacacacacagatcaacgttgaaggcgggcatttcctagcagaagatgtgactttgtttgatgcaccattcttcaacatgacaagcgacgaggcggccgtaggtaaactcagcgaccactgggtccggactgtttttctaatacccagcccttaggcgatggaccctcagcagcggctgttacttgaggttacttacgaaggcttcgaaaatggtatgtccatgctgtcctcgtatccgggtgtacgctcacagccaatagctggtatcccgatggcaaagattatgggcagttcaacagcctgctttgttggttgtttcaacgccgactacaccgatcttctcctccgtgacccagactgcattccgatgtatcagtgcacaaactcagggcagtcgcgagccatgacggcgaaccgagtgtcgtacttctttgacatgaaaggccctagtgtcacagttgataccgcctgttcaggtagtttgacagctctccatctggcatgtcaaagcctccggaccggtgatgcgtcgatggccgtcgcagcgggagtcaatttgattcttagccacgagttcatgtcaacaatgactatgatgaagttagtaagaaagacacattgtatttaactagatttgacaaatacgcaggttcctttccccggacggacgatgccatacattcgacgaaaatgccagcggatacgctcgaggcgaaggtattgggtgtttgatcctcaagccattaagagacgccattcaagaccatgaccccatccgcgccataatccgaggctctgggctgaatcaagacgggagaacccccggaattaccctgccgaatggcacatcgcaagaagctctgatgcgtcatgtctacgaggtggctggcctcgatccatgcgagacggacttcgtcgaagcccacggtactggaactcaggctggcgaccatattgaaacagcagctctcgcaaaggtattttgccacaatcgaagtcccatgcgaccgctacgagtcgggtccattaaaaccaacgtcggccatctagagggtacgagtggagttgcgggcgttattaaagccgtcctgatgcttgagaatcggacctttcttcccaaccgcaactttcgagtggtcaatcctcgtatccgatgcgaagactggaaactgaaggtaagagttccgaacaccttcatttaggtatttgtcattaagcccgccacagatacagttatctgcggagccgtgggaatacccgggcccgcatcgtgtttctgtaaacagcttcggatatggggggagtaacgcacatgccatactcgaagatgcatcaggctatctttacagtcgtggactgagaagtatagtgcaacatggcgagcatgttgtcgatgccaaccaagtttgccctaaccgatctcgagtctacatgttctctgggtttgatgagaggtccaccacgaggcagcttcagaactttcgagaatatctactcaaggaaaggtccgaggcagatgatagatacatgagtaacctagcttatacgttgaacgaacgccgtacggtccatgcctgcagagctgccattgtgggagcatctcctgccacactagcagaagcatcatctggtcgggtgaaaattgttaaagctcgtcgacgaccaactatcgcgttcgtcttcacgggacagggtgcgcagtgggcgggaatgggaaaggagctattcgaggcatacccggtattccacgaatcaatccaaagaatcgacgactatatgctatccattggtgctccttactgtatggtgggtacgttaatctggtattaccccttgccaggattcgcttcatgtcatgaccagcatccgctgataaatatgaatagatgagatcctgaagactcaagaagtttcgcgactgagcaaccccctcttcagccagcccatatgttctgcccttcagatagccctggttgatctactggcatcttggggaatacatccagactcagtaaccggacactctagcggggaaattgccgctgcatatgctactggcgcattgaccatggaggatgccatggcagtggcttactaccgaggagtggttgtcagtagctcgtctttcgctaatgggcagataaggggggccatgcttgccctcgggacgtctgtccgggagagccagtcgtatctcgagatgctccaatcgggcaaggctgttgtagcgtgcatcaacagcccaacgagtgtcacgattgccggagaccttcctgctatcgatgaattagagcggatcgttcgcgagaagcaagttttcagccgccgactagcagtggaagttgcataccattcccaccatatggaattagttaaggagcagtacttgggtcatatagcgcatgtgagcccacggagccgtgaggaggttgcaaactatcttcataatcgatctgtatcctttttctcttccgttacaggagcggagatcaacccatccgaactggattcacgatattgggttagtaaccttctaaaccgggtgaattttgccgattcgttgcgcgctctgtgctttgagacaattaaccagcgggatcccgtcaggacgctaagagacaagcgaataaagcgagccggtacggctcaaaaggtcagcgtggatgcccttgttgaggttggtcctcatgctacactggcagggccaatcaagcagaccttgcgagatgacacaaagctcaatgcagctgatattttatgcattagtgttttgaccagaaagagcaatgctattacaacggctctaacggctgccgctacactaatgtgtaccggatatcccgtggactcccgggcgattaacgatcccacggcttcccaggaaccaagcgtgcttgttgacctccctcagtattcgtggagtcatacaaacacatattgggcagagccccgggttagcaagacctttcgcaatcgcaagcatgccaggacagatctattgggcgtcatcgataggatggcttgttcttttcagcctttgtggagaaactttcttcgcgtgtctgaaaacccttggctattggatcacagaatcgaatctaatattgtatatcctgctgctgggtatattgtcatggcgatagaggcattccttcagcataccttaatcggtaccactgcagatgagaaacccacaatctacattcgtgacatatccattcaatcggctctagtactccacgagacagcggctgtagagaccttactcatacttaaccaatgcgagagcaactctcgtggctcccatcaggctcacaaatttcacatttactcagtcacgcaggacaacatatggacagagcattgcaatggtttgatcggagcacagaatggcgatcaggtcgaatctggtcttgaatctgagcgagcagcccacaactttacttccctcgacatcccatcattttacaaagccttagccagtgtcgggctcgagtacggaccgtgtttcgctaacatcaagcaagcacgcttcaagaactcaacgtgtatatcagagattatcactccagatactgctgcagtgatgcccatgaattttcagtttccgtttctgatacatccttgcactttggacagtataatacacacaatattcgtcaacacggacaccatcaacgaccctgccgttcctgtccgtatcgatgagatgtgcgtgtcatgccgcacagattacgcggctgggagcaaactaaatgtgttgaccaaaacacagtgcacaagaaagggggatcttatagcctcgatttcagttctggataaatctcggcgaccgtctatttcgattacgggtctacggtgcaggcgtcttggaccgagcccacctccggagtcgaagagaatgaagaatcatatagcacatgagttgaaatgggatttggatatagatttcctgaccgggtctgcgttatcgagcattgtccccgtctgcaaggagtcaaaaaagcagtctagtggatttaacgctttgcatgaagcatgcgcattatactacatcaaggaatacgttaaacatgtggatcaagcgaccactgagaagctccagcctttcaggaaaagacagctcgaattcttcaaagagatagcgacccagcgatatcgaagatcccgcaatattcagagcggtgatatcgaacgagtcaaatcttccggtcctgaaggtcatgttctctgcactgtgggcgccaatctctctcttagcttgacggaggacaccagccttggaacagttgatgaacactccatgtgggatgagtactggaaaacggtctacggtgacccggcatatgaaacagtctccatgtacttggacctggttggccataagaaccctatggtatcaatccttgaagtcgaggctagtacgggtggagcatcgaagagattcctccaacggctcgtcggggcaaagggtggtgttactcgattcaccaagtataccgcaacacacccagatctacatcttctagagtcaacacgagacgagatctgtgcatgggaccactgcgtggaaatcaaggagcttgacgtcgagggagacctagatgcccagggtttcgccatacagcaatacgatgtcgtggttattgcacatgggctatacacagtcaaatcgaagcataaagcattgagcaatattcatagtctcctcaagcctaatggccatctggtcctgatcgatcctttattcaagccgaaattatccgagtatgtaatattcgctgattttgcggggccgtggaagcaagatggggttggatatttcaacaatgacttgataaccactctaaaggatgctcagttctcggaactgcaagaactaaacggatctagagatcaacatatggttattatttctcgacctacaagacaacagacttcgctcacgtcagaagttgtgattgttgcagaggaaggcgagtgtggtgtacagataccccatttgcgagaccttctttcttcagtatcgcaagttgacacaaccgaccttgctcatctaaagccgcagagaaaggcttgtatcgtcctaagcgatctgcagttaccggtcctaacacatctaaatcaagcaacaatggatataattaagcagatgtttctggaagcggccttcgtcctctgggtgacgcgtggtggcacaatcacaccagccaatccagaagccggcattatcaccggctttacacggactgctcgctcagagacgggagtagagcctattatcacacttgatttagatgctggcagtccgctttgcgggtatcgagcggctgaactcatctacgatcttgttcgtcatcgtatgttgggagggaagtcagccgagtccgatacagagtatgtggaaaggagtggtgcgcttcttgtccctcggattatggagaaccgacggttgaatgaagcgattgcatctgttcaagataagcatctcacaagcgttgaagccttccatcaggagaaccgacctttgagagtggcggtgaatgatagtgtccaacccgaagatatccacttcatagatgacagccggattaccacgctttcggataatgaggtccgcatacaagtccatgccgtcggcctgagtgagcgagatgcgcagctagcggacaaccaagcttcaggcgcagcggaaattgggctcggatgtagcgggactgtacaagctgtcggtagatccgttcgcaacctgatacctggagacagagtagcctgccttagatcaggaacagccgcaagtttctaccaagacagagaaactgcatttcaaaaaataccttcggatatgtcttttgaaactgctgccgcgattcccgcggcttattgcacagctttccatgccgtccattgccttgctgatataaaacccggagatagaatattgattagctctgctgctggagcagttggtcaagctgcaatcgaagtatgtactgtatcaggtgctcattcatacgcgcttgtggggagcgccgcagataaagaacttttcgtctcctcgtctctgttgtccgatgaacggatactgcggactgacgagtcgtacttcaaagatctccttatgttgaccgataacaaaggagtgaagacaatacttaactgtggtgaatccgacaatcataccttccgttcattatggaaatgttttggagcatcaggcactttcattcaattacatgcccgtaacacagctgagaagcgtggatgggaagtgccagaactcgacaaagatatcatttttgctacaatggacattgagaacctagtcaataataattctgaaatgcttgacgaggtttgggaccgagtagcgcgtctttttcgccgaggcacactccgtggtcactcacacccgacctcttatagcatctcgaactttgctgaagcgctggatgttctcacgctaacaaatcatcgagacttgattgtactaacagctggtactgatgtcatggtcaaggttcgtactagtccctcccctattggaaaatactaagtcagtagactatcgtccctaggcaacccgatatgcttctccgaccagatgtatcatacatgcttgtcgggggtctcggtggtatcggtcgcgcgacagcactctggctggcagatcatggagcaagaacaatcatcttcgtcagtaggagcggactatcaggagcatcgtcccaaaggactatacagggattgaacgagaagggagtccgaaccatcattcatgcctgcgacatatcccaatctgatcaagttgaaaagatggtgaacgatcttcaagaaactgtaccaccaattcggggcgtcatccaaggtgccatgattctaagggtaccttctcctatcactcgatctacaaggatgaagctgacagatcccaggacacccatatcgagaaaatgactcttgccgactacactacaatacttgggccaaagtaccacggcacttggaacctccaccgctacctcccatccaatctcgactggttcgtcatgctatcttccattagcggcataataggcaacgcgacgcaggccgcctacgccgccggctcaacattcatggactcattcgcagcataccgtaactccttaggccttccggcagtatccttagatctaggagtaatcaccgatgcgggctatctagccgagaacaaagaactggcatcgaaaatggagcagcagggattccagggaactgatactaagacccttatgtcattgatcgaggtagcaatcacgagctgccaggaagacagaacgacttcccaaataattaccggtttgggtcagtggaaagcaggtcgatcactacccaacttcgatgcacctcttttctcccactttcgtcgactccatctggacacgtcagtcagctcccagaccgaaatacccgatacactgagacaggatctccaggccacgaaaaccctcgaagatgctacagctgtaatctatacagctttaagtactcgagtcgccactcatctctcaattccagttgacagcatcaaccctacaggtccaataacggagtacggaatcgattctcatgtagcggtcgaactgcggaactggatctccaaacacatagagggcacggttcctattctggaaatcttagctagttcgtccttgatggagttggcagggaagatagcagacaggtccaatctagttagggtcgatgaggagcagttatcgtcggcgttctgaggattgaggctagaaaacttggtaaattgcctgtcatatagtatatctctgctctggaagtaattatatgaattcaatttacagtatcatcattttgcacaatggctggagatgatactgtaccaataccacacccagtttctcacgaatggataaattaatccttttggtctgttcagccatcctgcaggagttggaggttgtttcaatcccgtccaattgccgtatgacagtatacggacaagaatcccaagaggatcgttaaaatgttctttttatataaagcttttaagcgctatggcgatgtcctgactaaaaacaattattcctggttacattctttgtccattctagggcatactcttatatctatgttgtccaactctccgaatctatcaaagttaatctacctctcaatttcttatccactctaaagtagactctcctcatcatgatacattccaccatccatgctctcagaaccggtactggggtcatctgaggtacataatgacttcgtatgctgtttttgagcgcatatcagagtccgagccaacttcgcaatactcatgctcaacccatgcaccacaacagagcccaacacagtaaagcaaacaacgggccaaaccaactccacagtttcacaggcatatttatcccagtcgtcgcctggctgcatctttgtccgcgaacaggaggaattaaggatatccctggcctccatggacaaaaacagagcaccaacacccatgggtccaaagtgaccgcagaagagcgcctctctgtacgttttgatatcgggattgaatcgtttcgatgcgataatgaaagggattcgacgaagtagtagaacaaggagcacaaagatcccaatctttgacaatgataattttggcgtatcagtgacagcggcccaagggatcatcaggccgaaatagataaacgtcgctatgctgagagagaagctgataaatgaggtggccacaggatttacctggtaggcgtgctcaagccagccgtggtatgcatatccgatgcctgcgctgaagacaagtaggaagtcatccatccccattgtgcttgagaatcctaagctgaagaagatcagagctaaggggaacagagcaacgaagttctcagtaatcctgccacgctcatgggaatatcggagaagtcggttcgctccataaccgagactaatcccgacagcaacactcgcaatgcattggtaggctattgtcaccgtcaagtattcccgcagcacagcaccagccgaatgctccttcaggatgaaaatcccgagatataagaacgggaatgaggtgccatcattcacaccagactccgcggccagaagatacttaatacggtcgctggtcgccttgggatcctccaggatggtcgcgaccagcaccgggtcggtgggagtgaggcaagcgctgataacgagcgcagaagggtagctagcaccgaaaatgagatggatcaggatcgcacatactacccagccacctatcataacagggccaagaagaatgccgattcctttccagtgcttgctgcaatatccctcagggagctcaatgcccacgatgaatacctgcatgcttgcagtgagtcgtgctagctccttggtgacatgatttccgagcttccacggctggggctcaacagcacccaataccgcgggtccggtcagaattccgaccaacgtagcaagcgggggttctgccagaaggagtgtttcttttagaaaacgtgaaagcacagtatagaggaggatactgcccgagaggaacaggaagctgagattgagcggtgtagggttgatctgactccataccatgatggatttggtaaaccgaagactttttggataagaagaatgatagttgaaacttctggctgtctacctactaaactaaccatagctgttctctttatgcagacacttaaatgttgagcggttaggagaatgcatgggtgtttgtagatgctttctcattctgggcaaggaagtgataacaaatgacttgccaagccacgtaccatggtattttcttggttgaatcaaaaggaagaactggtagagaaaaacctcccacccttatggttcgttgacagctggtagtgacgtcaacgatatgtgaggcaaaccgtttgtattcttgcctctcgattctgacgcagcagtagttgtcccaataggtagtttcatgttagataaggttgcttcgcagatccaaggctccttgatcttcctcgactctgcatagaagtcaagtgtgctgtccttgtagggctgtagtgctgattagtaagccagggttggttcatccctttccgattacttgactactaccaacaattccttgaaacaacaagtagcttctccagtcatgttcttatctttcaagtctgaaattgttatgctggctaaggccgatgctttggcgcacggccagtaggaagtccccttaaccttgtcctcctactcgcactgattatttggaggcaggtcaaaccctttcggtggtggtgttaaataggtttcttcatttttactgttatattactctatcaacacataatactatacgttatatcaccaaccaatcaatttatcgccctaaaatccgatcacgatgcacaaatctcccatcccgcttgatctggtcgtgaaagttcctcgcccaatgcaaatgataactatcacccagctccgtaaataatctcaatgacatctcctgatcttccaggttctctgaatgattaaacggcgaatacatatatcgtcgctggatcacaggcatattcttgtcccacccctggtcgacggcatatcgcgctacagcaactgccttggcgtccgttgcatatgctttcggggtgtcgcggaagatattccggggtacttggtccaggagaagaattagggctagtgcgccctcgccctggccgtcaaacttccaaccgtcgagggcccctgttctggcagcttcgtagtcggatccgaggtgcttacgaacgtaggcgtcgtcggacggacttccgtaccaaaatgacttttgttgaagatactctcgggagcctttctggccaaaccagaacgtgaggactttgtcgtaagattttgacattgtttttcgcatggattccttttggccggaaggcgggagtaaggaggtggattcacgggctgtatacagagacctagtatgctattggtctcgatgtgaccctgatcttatgtgagattgagttgtgatcgtattcaacttcattgttgatccattcgttgatgttttatacttgcgccaccgtcactctaacccatttaggatatcacactctgaactcaatttcgtccatgtctcagacattaaatttaagcattggcttatgttgttataatcataactgttaaatatcgaattggggatgtggtttagtggtataatactcccttagcatgggagtggtccggggttcgattccccgcgtctccatctttttgttagtttcactacctcgcttttgttctttttccgcttctttttggtttgcttagggtttattttttgttttataattcctcaatcggcccctattgcttggtcttgaacgatgggactcggagtagtatattagtgtctttgcggtgaaatatatatacagcatttctcccacctacctttgtgttatacattaaggaacttgaacctgtaaaaacaacatgtcggaaaccaatgtctgtattactagtactaccttaataattctatatccattcttagtcaaatttcttcgagatactcagcgatccagaggcaccaaatcgaactaccgttagagatgctggacactagaagttgataggattaatcaatccgatgactcacgatgcagcccataccctagaacaattgatcaacaactcgcttcatccactaaatactaaatccttgataaatgtacagaaaagtatcacgcacatatgataatctcccaccagtgaccatagcttaatctcctccaaaccaccaccatgtcatctgctcctgtcagccaaccaaacccccaaatcgaccacgcacacgcacaacttcaacctcatctacgccgcacagcagccgatccccgacccgtagttctaatgacctgcggaattgcaggcagagcccccttatccatgacattactacccacaaggacctaatttataccaggttcgggaaagtcaacactggcccactcaatcgtctccgcatacccgtccttccgccgtctctccattgactcctacatctattctcaccacggcctctggaatatcgactacccccgagaacgatacgaagaataccaactcgaagccgaagcagcactacgggcggaacttatctccgcattgaccggaggacaggtagacctcgtactcgacttttcgttcgcataccacgaggtacgcgaggagtggaagagattaatcgagggatcaggagggagatgggtactggtgtttttggatgttgatgctgcggaactccgacggagggttcaggctcggaatgagcgagttgataaggatggggactcggcgttttatgtaacggaggagattctggaacggtatcttagtgggtttgagagacctgatggcgaaggggagattgtgctgtgaggggacttgtgctgttgttcctttggggtggtgtatggctattcagagttgtgtatatttgggatgagctggagtcgggtagagacctcagcattcctgacctgggctaattggcgtgcagattctttgtattatatggagatatcatgtgcatattctcaagtatcaccaattggacctggtagtcatcagcgaagtagccatggaacaagacatctgtgatccaaatgttgcttaatgtcggaacgtctcctgcgtaggagactattaattgcaggacttggtcacccttatgagggcggagcgtggatcggacgatattgtctatcttctgcggcacaatggaactgacatacagacataagagaatcgatgagacacatcgttgtataaggttacaagagctgaacagaaagaagtaacacaattcgaatacgaaggcccactgattatcttctagtcggatttaacggcactcccccgctcggcatggcggcggtgtggttttagaaagccctaggaatacccctggtgtttggctgaaataggacaaaccacactcggaaggtactaggccatctcatagtaaatgccgatgcccgaaccgtaagcgcacctctactcgcagcttaagaagatttctcgtattactcaattagcggacaaacgcccttgtgtcatgctgctatgcctgactttatatatgtcgttgtggagtttcttgaacgaaatgccgactcgtggccagagaatctagaaagcaatcgccatggaaacacaccgagagaaagaattaaagacatcgacgattctaatcttgtcttatcatccgcttgatagccagatatgcccatccagttaaaaagcaaggggtagatttacattaggtagctactggagaggtgggtgctttcaaccattccatcactcgagtgattatcttaaaagtctcggaaaccctacttcgtgacagtgaccctttctgatggactacagttatacatcaaggggcatgtagttgctcctaagccttgagaacgggatgcccccaacaagcttgttgaattgcacgagacagccctgattgcagcagaacatctccgaaaccaagggcagtcgtatatgggatctgcgtttggtttagcatgcactcggaggatgcctcggagataatgctttcgtaaggcactactaatcaatctttgctggatgaccggttgggtatacaataacgtcatactggctgctaccttgtatctgagttaatttgcgttcacatgagtataaggacaaagaattgcgttctagaagcagggcgcgattccgtctattcgcaagtctaaccttatcaggaataatgtcggaagctgcccacatccgccccgactttcttcaatgccctaaccagttagttaattactgaactacaacggatgacaaagaaaaatgggaaaaagggaaagaatccgaatattaatagaagtctcgggcgtcggtgtcaaccaaacacgaggtatggggtcttttacgacatagattaccaataagatgagtcttggcatgtgtgagaattcatgcttgatgtgagggatgaaggtgagccacaatgcagagtcgatagagcagattcagagtttgtcatggcagcaaatcatcgccgtcgtatcgtacttgcgcaagttcaccgtctcatctggttgaagttgatagtcgagatttatgtaacataagcagacgccgcatggtacttgcgcaaatgattacctgggagtagacatgtcgagttattttacggataatatcgctctccacctatttcagtgttggaacgcttctcgtttcctgtttcgataaactctcggggtccgtcgtggtggtggtgactttgcccggaatttagataggaacatgaacgtggactatagccgcttaacaatcggctgacgcgagaattgaaaagattaggtagacaacaaaggggcaaataaaaaaaaagggaaaaaggaaaatttctgcgccacagccgagacgatcaagataattttgtatttactatcagatcaaatggaaaatttgacaagacgtcggaagacagctccccgcgctaaaccagaaaaggagcatccgctgactcagcggaagcattcggactttgaaagtctccaagaagccaatcaagagcgccaattgaaccgtaaccgctgagtcatcggaagggaaaacgagattggcctccgatcggtcagtcgaaggccgagtccgaacccaaactatccaacactaagattcctgatcgacaaatgagtttgctgctcgacatgcaaattctggaagggacttgcgtgtaagcttgaacgtttcccctttcccatccgttgattggtttgaaacggcgcagaacctgacggagataaccactggctttaggccccaccgctcggaatatcgacctttttcactcccttttccgcgacaaggacttgatagccacgtctaagcaagatgacgcccctaacaaatcccaataaactatggagtccgctggagcctcgatccatccctggtgggtcgcttaaatgtgaactcggtgccggtctggtttcaggcccccagacccactcaagggcaatgtgcttatatacttcgttgcccgtcccatcctcgtgagggaggattttctttgtcggtgtgaaacctcgccagaacgcttcctgcagcctgaattgcagtccaagcttccctcaagccatggagggccaggactactatgcgaaggcgccgccttcggacaacagagatgataccgacagcacagctacgatgatgggtgatgagtctgcgccaaccccccgccctgccaatgtcagccgcgccgaagactggagcttgatgccacaagttaaacagcagcatgaacgagatgtggcgtccggtttcaagagtcgtgaactcggcgtcacctggaagaatgtgaacgtcgaagtggttagttctgaggccgccgtcaacgaaaacttcctatcccagttcaacatcccccagaaaatcaaagatggtcgcaacaaaccacccctccgctcgattcttcagaacagccatggctgcgtgaaacccggggaaatgcttctcgtgttgggtcggccgggttcaggttgcacaaccctgctcaaaatgctctcgaatcgacgactcgggtataaatcggtggagggtgacgtccgttttgggtcgctaactcataaagaagccaaccgttatcatggccaaattgttatgaacacggaagaagagctattcttccccacactgacagtgggtcagacgatggacttcgcaacccggctcaagattcctttcaacctccctaaaggcgtagagtcggcggaagcgtatcgcctggaaatgaaaaagtttttgctggaagccatgggaatctcgcacacgaacgatacgaaggtcggtaacgagtatgttcgaggtgtttccggtggtgagcgcaagcgtgtctcaatcatagaatgtatggcctctcgtgggtcagtgttctgctgggataacagtacacgtggtttagacgccagcactgctctcgagtggactaaagccattcgggccttgacagatgttatgggcttgtccaccattgtaacgctttaccaggcgggcaatggaatctatgacttgttcgataaggtactggtcttggatgagggcaagcaggtttactacgggcccatgtcccaggcaaggcccttcatggaggacctgggtttcgtctgccgcgaggggtctaacgtcgctgacttcctgactggtgtgactgttcccacggaacgcaagatccgacccggatatgagaaccgattcccccgcaatgccgacatgctcctagcggaatatgagaagtctcccatccgtgctcaaatgatggcagaatacgactacccagactccgatctcgcccgggaacgcaccgacaacttcgagatggcaatttcgcacgacaggagcaagaagctaccgaagaacagcccgatgacggtcgattttgttcagcaggtcaaggcatgtatcattcgtcagtaccagatcctttggggtgataaagccacttttatcatcaaacaggtgtcgaccttggcccaggccttgattgcaggatccctgttttacaatgcgcctaacaattcgggaggtctctttgtcaaatccggtgctcttttcttttccttgctctataatagtttgttgtctatgtctgaagtgaccgattcattcagtggtcggccggtcctggtcaagcacaaaggtttcgcttttttccaccccgctgctttctgtatcgctcagatcactgccgatatcccagtcctcttgttccagatcagcatcttttcccttgtggtctatttcatggtgggcctcaccatgagtgcgtctggtttcttcacttattgggtcttggtttttgctacgacaatggtaaaggctctcccatggtatttaatcaacaatgtttgaagtgcagccatgggctaactgaattgcactataggttatgaccgcattgttccgtgcggttggagcactcttcacgacattcgacggcgcgtccaaggtttccggtttcctcatttccgctctgatcatgtacaccggatatatgatcacgaagccgcagatgcatccctggtttggctggatctactggattaatcctcttgcatatggctttgacgccttactttcgagcgagttccacaacaagattattccttgtgtgggcacaaacctcattcctactggtcctgggtatgaaaatgtccccaatcatcagtcctgtgctggtgttggtggcgctatccaaggcaacaactatgtgaccggagaccagtatctggcttcattgtcctacagccacaaccatgtctggcgtaacttcggtatcctatgggcctggtgggctttattcgtggccgtgaccatcattgccacgtcccggtggaaagctgcttcagaaagcggtaacacgcttttgatcccgcgcgagaggttagataagcatagccaggttgcccgcttcgatgaagagtctcaggtaaacgagaaggagaagaagcgtaacgacggaagctcccaggagggtgacgatcttgacaaccaactggtccgcaacacgtccgttttcacctggaaagacttgacatatactgtgaaaacacctactggtgaccgcgtgctcctcgataatgtctatggatgggttaagcctggtatgttgggtgccctgatgggctcttctggcgctggaaagactaccctccttgatgtattggctcagcgaaagaccgaaggaactatccatggttctattatggttgatggacgacccttgcctgtttcattccagcgctctgcaggctactgtgaacagcttgatgtccatgaaccgtttgcaaccgtgcgtgaagctcttgagttctctgccttgctccgtcagccgcgtgatgtccctgatgatgaaaaactgaaatatgtggataccatcatcgaacttttggaattacatgatatcgccgacacgctgattggccgggttggtgctggactgagtgtggaacagcgtaagcgtgttactatcggtgtggaactggtctcaaagccgagcattctgatcttcctggatgagccgacatcaggtcttgatggccaatctgcatataatactgtccgtttcctacgcaaactggctgatgttggccaggctgttctggttactattcaccaaccttctgcccagctatttgctgagttcgataccctgcttctcctggctaaaggtggaaaaatggtctactttggtgacattggtgacaatggccagacggtcaaggattatttcggccgttatggtgctgcgtgtccacccggtgtcaaccccgctgagcatatgattgatgttgtctctggtactctctcccagggtcgcgactggaataaggtctggctagagtctccagagaaccagcgttctatcgaagagcttgaccgaatcattagtgacgctgcgtctaagccccctggtacctttgatgacggccgagaatttgccacgagcctttggacacagataaagttggtgagccagcgtatgtgtgtggctctgtaccggaataccgactatgtcaacaataaactggccctccatgttggctctgccttgtttaacggtttctctttctggatgatcagtgatactgtccactcgatgcagctccgcctcttcaccattttcaactttatcttcgtcgcccccggtgtcattaatcaactccagccgctgttccttgaacgtcgagacatttatgacgcccgtgagaaaaaatcgaagatgtactcgtgggttgccttcgtgaccgccctgattgtatcggaaattccctatctctgcctctgtgccgtcctttacttcgcatgctggtactacacggttggcttccccactgactccaataagtccggcgctgtcttcttcgttatgttgatgtacgagttcgtctacactggaattggtcaattcatctccgcctacgcaccgaacgcgattttcgcctccttaattaacccagtgatcattggaaccctcgcctctttctgtggtgtcatggtgccctaccaacagatccaagccttctggaggtactggatctactggatgaacccgttcaactatctcatgggtagcatgatgaccttcaccatcttcgatgtgaatgtgaagtgcaaggactctgagtacgccctcttcgatcccccgaatggcagcacctgcggcgagtacctcaccgaatttatgcagggcatgggcgctcgcatgaatctcctggatgcggacgcgacctccggttgccgcgtgtgtcaatatacgaggggtagcgattatcttctcagcgtcaacttgatggattactactacggatggcgggatgcagctattgttgccctgttcgcccttagctcgtatgcccttgtgtacgttctcatgaagctgcgtaccaaggcctcgaagcaggcagagtaatgtggccgaaccactggatggggtgaagaccatccccttcccttctctaattgtccgtataatatttggttgcttgctcttctttatattccccgaacataattctgccggattagactagcgttgtcgatagatcgctgcatttctggtgtttgcctttttatttatgatagatataccaagtgctagaagagctatgagctgatgcgcttcatgtgaatagaactgattgagttgatatcatggcattcattgtaggatgcgtatttagggtgtgcgaaataagttatcgtcggctgaaagtcatcaccgtagtcaaaagtcagcagtaaccttgcacaggcatcgtcagatttacgagctgcatgttgaatggttgaagaaggtggttccggaggatcgcttggtgttttgtcatgttagcgatgggcgggcattttgagtgtggtgggtgttgcggtggctgcggttgccatgcggtagtgaacgatatgtatgtattggcttgatacatactaccgccgaggctacatgtaattttacaatcatactaatattctccgaatatctgtatcgcaggaactaactcgtagccctactagttacagtataataagttgacttgtatatgaaacacgattgaacgtggctgtcaatattttaaggaaagtcattatatgaaacgaacactccgtacctcctattgcagatgtcatgaacaaatttcatcatgcacaagtcacactgccgtgcccaccttcctcatagcgcggcggcggattcgtcgcagatggattcaaagctgacgaacaaggactggactcaactgtcaagtactattccatcacacaactcgtaactcacataatctaaaagaccaatacgtcaaatgccttgaacgaatacgtgaatatatcttgcggaatagagtatatgattttcctgctcagtcatggacggggatagatggtatagagggcccattgactaccgccaggacttcttaagcgtaatcaatatatacttgcattgcaggcacatgacttgttctttctctgcaaggtcgttgcttttttccaccacagtcattacccgctgctacgagcttaatctgcgtgtcaccttcagcaccgtcaacgaaacaactcgtatgaggcatgacagacaaccaccgtgagctttgattgtatgagggtttgcctgaaatacctcaggcatcaataaaggtatcacgtgtggctcaacaaagcaacgcttacccgatgcggcaggtgagcaaggtcacgggccccacagggcggagacaaaccgcagaataacaaaaagaaaaagagttcgagattctcgcgttgacagcaaactttgacagcaaatcgcaaggtgggtggccctggagtcctggacccaacggtcccggaacgttattcattaacaggggaaaaaggactggggaacggtcggaccgcccttttgatggatgagttgttgcaccgttgaacccacatggtgatgacgccgtcgacgcggcaccgtctatgccgttccgttattggccgcccgcgatgaacgctgctgtaagcgaagcagggaatctctcggacatgttcgttgtgatctcgctcgcttcgatcctgccgtaccgttggctccaacccatggtgaacccgactttcccatccctccgcctgactctgggatcgcgacgcgaccaccggaccctccccctattcttcccatgattacccacgattctcgagcgttgcctgtgtccggattaccgcgggagaagagagccgcggttgtgccctctcaggcccctcgtcaggttcgatcctgtagggtttgtcgactgcgcaaggtcaaggtacgttccgaaccgatcgtggtctgagcttctcgttttagcatcaccgttggccgaccccataccattaattaccataaaaatgaaatgaaaataatttcatgatcataatttacgtccctcatcggctctaaaacaacgaatcctcccccgacgggccaccccgacgcgttgtgaaactgactacccatgatagtgcgaccgcgtcaaaccctgtcatgcatgttgcgcccatggctacccatccaagtgcgtgtatgaaccgggcacagacgaggatccccagcccatcagtcaagcggatgagatccgaaatctgcgggcggagatccgcgacttaacggcccgcctgaacaacagtagtaagtggccccaactccccgcatgacgaatcatagaaccatgactcgctgacttggcattgcgtcgttcctcagagcgccggcaccgatcggagcggcgtcaggcccaactgcaaaggctgtttgcgactatacgctcggccccgctggagcttgtcgatcgactaatcactcaaatccgtactggccccagcggatcgaatgagctggaaggaacagaaggtgtgtgcgcgatggcgtgtgcgccagtccagaaccgtgcagggcagctgccaggctaacatcgcttggtgtatgcagcttttatccaccaacgctcccctgatgagaacaatgacgatattagcagagataacgattactgtgcatcacgcgggtcagggggcttcgatttcaaccgcagcccatcggaaagcagcgaagattcatcatcttcgtcgatcattagcataaacaactcgtccaggccaatgttggacgtgttcattgagcggtttgtggacgcttttagcccggaagtggatgtcaagtcgggtcaggcgggagcattgcgacgcgcagcggaaattcgcatgttttctccgcttctgatggatgcatttgaagtggtctcagcaactttcttcggtcggtccattcaggacccgcgaattgagaagtcaggcactctgctgtatggacgtgtcctgcgcaatctacaaaatgccttgtttgacccggaacggagcaaggctgaatccactctggccacggtcatcctcttgatggcctttgaggtaactctcttgctttctagtgtacggtttcaattacttaaccatcgtttttaagagcgtcgaacggacctcgcaagcatcgctgcaagcgcatgtgcacggtgctgtgcgtttaatcgaacaccgcggacctgagaatcatattcacggggtggagcacctcctcttcgcagaactgcgtccgtattgggtaagtttgtctggtgaaatgaatgccatgtcgagccacgcatggactaacgcgtccaaccaggttggggcggccctcgtccgccgtcagccttcatttcttgcagaggaggattggatcaatgtaccctggtcggctggaacgaccaagaaagacatcctccactacctgttagatttaacagtcgaggtgccatccctgttggcggaatacgacgctttggaagttacgcgacagtccggggtccctagtgcgcatgagatcaccgttaaacaggcggcactgtggaatggggttaccaacctcacgtgccggttcctccagtggaagatcgactgggtcgatgcctatcccgacgggccgcccaaggaggtgcccgcggaacccaatgaacactttcctatcttccgctgtcgcgatctccgtaccggtgccgtcatcaccccgaccaaacttgtctaccccaatttacgtcttgctcaaacgatgtgcctatattacacctcgcggctcatcttgtcgacggtcgacacccgaccggacgacgatcgtgtggggcccgcgcagcagtatgctctgggctgcggcatctgccgaactctcgagtggtacatcttaacggcaccaggcaacatgattaaccggcttgccttccccgtgcgcgtggcctgggaggtgttccccgacggcggacctgaacgacgattcatctacgacgtgttgaaactagtggagaagcgccattcgctcggtttatggggaagtgggatgtcggagctatcgcctcgggccggatcaccgccgaaagcctgaactggggcccttgtacagaactaggatgaagatgttggcgatcgcaggcacgaaagctgatgctttgaaggaacaaagttacgagcgatatgaacttggttaaaagttaatttttctttttattctcccctgcgagagcgaggtttactgatgaagaccgaaggggcacaagccttgacgtgtctaagcataagcataatccatatgatgtacaataatcacgcagctctttcggatactgacgacttgatttatacccaattttttcaccgttgaccatgccaagcgactcgaaggatcaattagctccaacccgcctgagccagccttcctaagccattttttttgtaatgacagctaacctcaaacttagttttgggagattgcttaatctttctgttcttgtctctctccgatcattaactgagccttgtatgatacccatcaactctaaaagctatcgaaggagtacaggaaggcactgaatagaaggaaccgtatagtatagtcgaacagtgaacatcaattcaaataactaacccctgaatctcgtaaaagcataatgcactttgcgggcaggcccggctatctacacagagacgcctcagaacatggtttcacttcaaagagcatgctgtactatttacaaccttggggatcacaagacaaagccagatgactcaatcagctcaatagccattccattagtaacgatatcgatgtgccgcaagtaggtggtttcgcctttttccttcctgtgcttttaccttctgtggtcatccctaggtgattgcgggctgatatactgatggcttaagttgtcgcgaaagcgaatagggagtcgcatatagctgatatcgtaagttgataaaagcagactcatattttcttccatcaaccccaagatccttcatccaggaagagcctcgaggattttgaaggtgacgacagtgatccttattacacactaagtccacacctgcatgcccatctcagtggtctgcattggtgacgttcttgcttgacagctcaaagagccagacctgcatcgtcatgtggtctagcggttctttcagaggtatccgaaaggctgtgagtgtagtttaggcataaatcataggacgcgcccctcaatcacgagtattatggagcagatatatgagtattgcaaagtcacatgtcttcaaccgcccagtggctatctcattcatctgctatgccgcgctatcgaccacgttgttcgacgacgcggtgctgagtatctggtgacgcttgccagtctcggaatttgggtggtgcaggaagatagacagggttcttagaagccagaacatcttcccggtgtcgggtgggccgtaaatgaaggcgaaaccaccgcacaaatgtctcagggactcaaaggcgattttctgctccttattgaaaccgctcatttttgagaagcgctgttggaactttcgatgaccaattgtctcgaataattggtttcaggcagggcactgctacacagatcgttcgctaagagtatgtcccacagcttcctgtcctcaattctgattctcgggagcccactgtgccataggagacccgtccacgatagtctttgagacaccatagccagactataaggtacgtgacttagacccttttgaaacagttgctgatgctttgggaaaggattctgagtattgtgggatgggcgatgtggattgtgacatgcgcttgaactgcactctatccatgccctccttagtgggttgcataatctaggaattatgtaacctttcttggtcatccttcattgattgttgacttcaggtattgaactgtcacataccgtgcacgagtggatcatctcaaatcctaagatggacaccagggggacttgaaattttctagatttggcggagaagtccaggtttactctgttcactttcgaacaccatcggaaaacgtagggtctcctttccgggcgtatttggtgtagtaaggatatgatgtaagacgccagcagtggtctggccgcagcacaacataccagtaatagtaagctgggtccatccggacaagctgttgacctgtcgagcgatacatattacggagccagccgtgattcgatcctcccgccggtacccgttggtgtagatacatgcgcggtggtgtcttcaccagtgaccgaacaattgtaggcgggacatataagaggccgaagtcatggtaggcatcatcggaggcaacatatgttgggattaaaaccgcaaacggcgagcccccacttcaattaacattgggtagccgaggctgctcctccttcaagattatgatcgcttgcacgcctcattttcgctatagtagataatatactcataccgtgcaaggccatcgaccagagaagccttgacgacttgggcatttgatagaacttgaacaccgtgtggacaaacatcatcaaggaggtcatcttcttcatcgggggctgcttcagcggacgcctgtgacatgaaatgggtgatattcagctggccccgtgggcccactctcaagtacaggatgaagggaagaaggacctgcagcagacagaatgttttcccaatcccggcggggggctatggtgcagtcctcgatcgcgtattctcgtgcttgaaagccactccagtgacctagctcatataaagagccgggaagctaggcaaccagcctatgaccttgcatggtactggctggcaaaaattccgtttgagtatttccatgttcggggtcgatctgctggatttgtagtagtttcgagcggctagttgagctcaggagtctgtttcatgctctcgattcaggtccaaggctcagcggtatccagccgagtggaaggttcaaaattgtcgccatgggagcgtcgccgtcgctgtcatcgcctagaccgtcacccattctggtagtgatggcaggaccgatgtgggcacgatgatagaaagtagggggcgcatgacagcaaggcaatgtttggaatccgggcatgatgcttgcttcatttcgaagaacaaattgtaagtctatcgtaatcgctcttcgctaagggaaagaaaagttaacgagttgtatttcgcttgataggtgacacttcctacctaccttcggtttgcacgaatgatcaattatgctctagggaaagaagctcgaggctttgttctctcctggctcagctggatgaagcctgtcccgctaagttcctcaatggatggtgcgttcatcttggatgttctatcgaggtaccggagacagagatgctgtcccctgtcaaggctcttagaattggacaatcatcgtcatcattgttagcctttttcatcatggtgaagtaccgagttaagtaaagtgatcgttgataaccgtaggtatgtatagtgtgaaaattgtatcttggttcaaccgacgagtggctgaaaattaaataagaaaaggtatacagcgctagatagcgagtacagatagccaggatgactatctaaccgcacgtgtaggtggcagggtatgtataccgaaagatcgagtgtctaaggcgaagtagctcaaacaacctatctacctgagggttttgttgcttgatccgcgatggccgtgaattgagtcctcgtatctcgaggtgatctatcaatcgcaaagtacgggtgaagcattgtccgtccaagcggcatgctgaatctgaaaaggagtcgggagaggaagtgacagagtccgaggtagatgacaagaaagagatcgctttgagacatctggcggcgatgcaggtgagtgtgagtctagtaaggcgaagaggcagcaccaggcgactgagtacaggctgtattaggaggtcagttagcgtggtctgtggccgaggagttgtaggatatcggggtaatatgtacctgtgcacaccaggtggttgagttaagatgcaaccgaggacactaaatgtggggggtacatccaactatatcatctgatgaaacgatgcctggccgattgttgagggagaaacatattttgcagtcttggaatcagtgcgaaactaacagtcaagctggcgtgcttcattatggtacttagcgtgccgatgtctgggtaggcaacgtagaagttagtacgacgcatgacttgttgaggagtgagccaggtcttcgtttatatcacgatgccttatataaggggttgttgatcactgaccgtctcgggaagtggaaggaggacaagggatcgaatacatacatgatacgcttgtatgtctgcctctcactatctcttctagatacgtttgtcggattgctgattttcagcacgcacgcctgcgcttctggtgaagaggtatagtagtctagtgttggtgagaaaacatctcggattagggaaaatgatccagcattgactaaaaccgagacctgcttacacgtggtcttgttatcgtcggagacaatacctccccacaatttgctctgcttgaaggctttgaggccaattcgggtaacgagccaaaaactatacaactgttagatgttgttgtattgagaacgtcaatgccgtgtttgtccagcatcttctttagtacgttaaaagatctagtcaaaagacgactgcggagccttaccggatacttaaggaaccagaatcatgcactgtttcagatctaatgactaggcaaatgtgcgtttctcaggtggtggaaggcgaatttataaaaagaattgttccatgacttagattcgaggattcaccggggaaaagatatacttattcacaagacagctaaaacaagacagtcatcgctgaggaaagtatagaaaacccaaatcattgttgtacagtgagagaacttgatgaagaagacctgtgtatgtagagaaaaggaggtttatatattccgctggagcagctaaagacagatgactacaacgtgaccgatgaatgttcactcaactgccttgaatttccgccttaatataaacttcaatcagtatcatttgacattaacctaacagacaaacgaagacaagccatgacagctgacaggaaaagcactgtaacctttcttgcttatttccagcccccagccgaggctcgagccaatgcgatgcagggaaccactcaaacaatttccaatagtgtggaatagcggcggccctaatcagtagtgccgagttaggatccatgatcgggctccttttgggagactccacctcagcgaatggatctgtatggttcctgaagccgatcgctattctcctgatcggatccataatctattttgtttttttcacgatccatgcgaggtccactccagctgaggaatgctggtcggtgcactgtcttactttctttttttccctacttataaggcgacatggacccttgaatttgtcgcggttctttgcattcccctcgtttccatacattcattatacccccattcctttcgtttgtacatgcactacgcctgcatacccacactcttttgaaagttaatcggaatacaataattggccacaatgaagttacattccctccttcccctggccgccctgctcaccccttccttggcaatattcggcatcaatgacttcgagtgtgaactgacatcggagcacccgaacccggttgtcctcctccacggtctcggggccacgtactacgaagacctaaacttcctccaatactggctccaatcgcaaggctactgcacctacgcgcaaacctacggcgcatacgacggcttcccgctcctcggcggcctgcgcccgatcagcgaatcctccagcgaaatcgccgcctacatccgcgacgtggccgacaaaaccggtgccaagaaagtcgatctggtgggccattccgagggcgcgttccaatcgctctacgttcccaaattccagggggtctcaggcctcctcgataagattgtggcgatcgcgcccccgacgcacgggactaatttcggtggtctgtataatctggcttatcttttcggaaatgtttcccgggaggttgttggggacgtgttgagtacgtttgggtgtccggcgtgtgatgagttgggtcccgatggggctgccgtgaagcgattgaatgatggtcagcctatcctgcagtcggggaataatctgacggtgattgtctcgaaatacgatgagatggttacgccgcatgagacgtcgtgggtggagggcgccaataatatctacgtgcaggacttctgtccccttgaccccgtcggacatattggggaggcgtatgatttgaatgtctggaacctggtcaagaatgctctcgatggcacgccggacaggaagttcatctgtgtgattgggtcgccaggaaagatctgattgtggtctgtgtgaaaatggagttcgagagtaatcttctctgtattgatatcaaaagtatatagtcccatatgtacatgcattaatgtatagtcatcagcatcaacgtcgcacatatcgcggcattagaattatcgggtgcaggtcttttcgtccaccagggtttcgtcggaggttcgtgaatcgttgctttggttgtcttgaaccaggttgtgtccgtcgctgtagctggttagcgcaagcattgtaaacaggatgagagatatgtgcgtacccgagcctcttgttcggtatcaacagagagaggatcacgacgggagcggacagcgccagcgcggcgatggtgatgtacctgcgattgttagcatgcatcattgaaccacctcgagagacataccccatgacatcggaatactgaaagaaaggttagcagatagctcaagtcaaacagcaaacaaaggaagatgaacgtacagctcggtttaccgcatttcgctccaccgttccccaagtcggcaacgtatccgtaatggagttgtacaaccggacgacggtggcctcatcaacactgtgtccgagatgcaaacgcagccggtcacgcagttgattggagtaaatggcaccagcgatcgcggagccgatcccattgcccaagaacgatcccagcaggatgagcgacgtaacctgcgccagttcggcatgagacacagaaatctgtgccgcgacgatgacgatcgtttctatcatgccgctgccagcgccctggatcagctgcacgatgaacagttccgcgacggagctctcgtttttgcgcagacggaccatcactccgtacccgaccattcggatggcggcgcccaccaccccgatccatttgtacgaccgtaatcgatacatgagcagtccggtgcccatccccaccaacgcctgcatgacgctgttggtgtagttgagaaactgcgcatcacggggcgagaagttgtgggacaccatggaccagacgtacaggtaggtctgggtggttccaaatccgatgttgtcaacgcatgccaacgccattgagaccacaacggacaaggtacggaagtagtgggtggggacgaccgggtggcgggcaaagtatttctcgtacggatataaacaggccagagcgatggcgccaagcactatcaagacgacgacccacggagtcttccagcaatcggatgtcgtggcagccagggtgatggggatcaggaccaacgcaaatccgccactcagcagggtgatgccgccaagatcgatgcgcgaacagaaagtgaagagattcagtctctcagtcaggatgaggccagagcgtttggcccgtcgttcgaaaaccagaagggtgacaatgatgaaactggcgcagaagggcatcaagatggcgaacatgccgataccccagcgccagccgatgccattaacgacactgtcgacgatgaatgccgacacccatggcgtgatcaagaagggaatgtacaggatgttgtagacaaagccccgccagcgcatggacgagatgtccgacacgacggtggagttgaggatggccgtgccggcctggccgacggaatagaatacgtaaccacccgcatagatgttgaacgttttggacgaggcacagagaatgtaggacagaatgtagcatgtgatggtaaagatgtatgcctcggctcgccccaagacgtccgagactttggctatgggcggtttacttactgccgtgataatgctagccgcagtgttgagcgtggccagcacggaaagatgtttgaagtcggacgtcgcgaagttgcgataagtccctacggtagagttgtccagttcactaaacgcatgttagagctacatagagggctttgaagatcaccacaagactcacaagatgaccataaccaggaccaagctgaacggtatgaggtagttagctggattgtactcgtataggatactggcagtgcatacccgatatagagcagatatcttcccttccggccgcccacagcttcgacggcctcgattttgaccgctccagtcgcttttggtggactggattctatgacgttgatttcgagctcgccgcatttctcgttgtacagcgaggaaggattggaagcatcgtcgttccccgacggatggaaaaaccttctccaagtagccagcatgttggcgacgagtacacccgtgcagtaccagtgatagacgggagatcgataatagaaaactactgattgcgcaacagtatcttcatcgttacaaccgggggggttgtaagtgatggggagaagtggagaaagaaagaaaaaaagaaaaaatggagaggggggaagaagagggtgatttgaaagcttggatgaatggggagtgatgaagaaagcaagcagggtttgcaaagtcggttagttggttgaatgatcgacacggtcagattagtagtaggagtaacagtctgtccacagttctccagtgaggggttgtgccaatcccttggcgaccagtctgctggacagtcgctgatgccgtcgatcacagccggatcgacgttcaatcttctgctaaatgatcatcccacacagccagcggtggagattgtacagcatcattggcacctcgatagtcggctcgaaactagtccttgaagtgccgtcgcgagtgtcggactagctgcagttgactagagtagtattttctttgccaagagagttgccgtttccggactcattagccctatctcgttaattcaagttcttgatggacggtgaaaaaattttctcttcttccttgattttctccaagcgacatccaactaagcaaaagctcagctcttggttgcacatagtacatacatgcctagttccactaacatcgcatcgcaggacaggttcatccgatcagtgctgaagaggtggagacccaaatgcttgcttatgcatctctaatgcatggtgccagtgaatcagacatcctccgaagatgcccgacttggtggaaaaatatccgccacagggcatggacatgtcccgtacctttgattgacttgactttgatcacaacagaaaacgtgcccaaccgctaggtgtcgatttatggtgcctcaggtatccagccatcatgccatcaaattggccaatgagaccgaagcagtcatttaacccgaaacggcaatccgaccacacgccaggcaccacgtgacgtcagggcggacgcgttaagaggaagcagtgaatacaatccctttaacacaaagaccaaatttcttctcgacgggcatctgcttctgcccctgatggaaatgctgaactacacccacctgcttggtacccactgggaccacgcctcgaacaaaccgacttcaacattgaccagtgaccgtgtgatcgtggctttcgcatcacagacgccatggcctcgaattcggtgatcccagtcgaccagcctaacaccactgcagagatcctccgtctgcaaaatcgattgacagacatccgcaaccaacgcaaaatactggaactacgcaatgagattgcccgcgaaagccagctgttggccgacgctcaacaccgtctgcaagcgacagaatcacaaatgatgaccggcgatcgctccctcaattcatcgcatacacctactcgacttactgcaggtagtgccataccagcagataagggcataaaggcaaagccatcggactcgagacccaaacccgttactggtcataataacactagcggcaatgtcatatctagaagagaggtgccaaagcttcccataaacaaaaagtactgtggacgggatcgatcatcgtatatcaccctggtcagcaacttgcgaggtttcttttgcaaacatgaacagcattttgcttctgataagaacaagattgccgaagcaaagagacatctatctcgccttatcctcgatgaatggacgacacttgaagagtctagcggacgaacacatacatgggacgagttctgcttctttctactacggcaaattgagaggccggcaacaccaaggctggcgcgccatcgatggaatgtcactcgaaaacactgcgatgaaaccgtgcaagacttcgcaaactatctggtgatgctggaggacgatttctcaacatcattatctgagcacgaacgcagccagagactttgtaatggcatgagcagttcattgcaaaagagagcaagagatgattcttcatttttcactttgaggtatgacgcacaggttgagttactggcaaagtgggaaaaggctggccctgtcggcaagatgtgaattcttgactgttggatacgagagatggaaagtggcgaattgcaactaggtgacaactctcggccatttgcgtttctgtgatctactgtgtgctcgtacgagatggatgcttgatggctaggaagcgttgcagcttcatgagggaatgaaaccaacattaaggtttaatgtgattctagtcataccgagcatgagaactttctactattgttttcttctttctttctatctgattcgtaatgtttgcaacctttcccttccccccgtgctggagtaggacagctgactgcaatctcccactaacatctctcctactctcaactactcgataccaactggtcttgtgtgcaatgcgttcatccacttcaaatgtaatggcatgcatcagtagtttacctccaaagatgttctacgttgttcaggaaaaaggaaactaacgtagcttcatcctatatgacatccacaggaactagaccgcgcttcgaagaagaaagaaacattcattaagacatcctggatagtaaaacaagcccactaattcaaataactccccttcgtctcttcatgaatcacatcaaacagcggtttcgcgctgaaataacccgccaaaggcgtccccacagatttatacgtaaaggccgcatcggcatcatccaccttgatcgtctgtcctcctcgtcccgccgccgccgcatcagccaataactgtgcataacagcacttctccaagctcacgaaccaaaacaccgtctcctcgatcgtatttccaactgtcaagagaccatgattctgcaacagagccgccttcctgtcgcccaatgctgcggcgatattctttccttcttcctcggcgaggacaatgccattaaattgtttgtacacgacatgatcctgtaccatacgttagttatggaagctcggtaaaagaagtccaggacatgctgacattgtaaaaggcacacgcatcctgagtgataatatccaatggccgaccgagactgcaaaacgcgcgaccgtgcagactgtggctgtgcgctgcgcagttgacgtctggacgagcagcatggatggccgaatggatcatgaacgcggcggcgttgagtaatcggcatgggccaccgtcgatgacctccccggcatggttgaccaggatcaagtcagaggctttgatctgagaaaaggcgacaccaaatggattaacccagaatgtgctggggtcgacggggtcgcgaagggtgatgtggccggccacgcctgtgtcccgttgatatatagtaagctatccatttatatcacaactcctagacaatgaatatatagtggggctggtctggtggtcataccctcgtcgtatccattctttccaaagatgcggaacgccgctgccagtcggcctttaaggtattcacgctctttcatcttgtcgtcgaatacgggtggtctgggaatgttcatctttactttggctttctcggcgccggcctcctgggtggattcccgggcttggagagtgatggggggagcagtctcggttgcagttgagggcgccatgttgctgtctgtttgtttgacgatggtagatgtaatgaagttgtcgtgactggtcgaaggacaaagtggcagttgttggggaaatcaagattaaatgcttatctgataagaatggagaacgcggggtaattaacctgattagagttaccgagcagaacccgaggttgttctctatattgattactttggtagtaatcatactgcagtggataaaaagaatataatattgcgatctccacatataatcctccctgcaagacaaaacagacaagataagctacggcatggcctcaatcttaggcacgctcccgatctgatccacccattgctccctccgcttacagaagatttccaaagccaagcccaagtcaccacgagactctgcatctaacgtgcccgtctttacagtaacagttcctctcccacccggctgcgtattaagcggggacccacaatccccgcagaagtgcctctggagctcattgcccagacttccagacggatgggcgtagatcttgggggttccggccgtgtaggtcaaggcgggtttggggacgatcaggttcgacgaaaagggggcacccgtgtttcgtttgcagtcctcgcagtggcagagagcaaccttagtgatgaataactgttagtttagggcggatctaaatcatcaagagcatggcgataggtggagcgatgctgatcttgggtaccttgggggatggcgcgtcggcggggagatccacgcggtaggtgatctttccacacaggcatgctccggtcaaggactttgaggccatggtgtgcttgtgtttctttcgatttagtgtataggtatctggtaaaattgtaagttgaatatgaaatgttgaggcgaaataattatgtctctgggatttgaggctgaatctgcgggacaaagaattagtctttcggacagctgtcataaaaccattggaacttaatgtctaccaaatacgagccctcgtgttataatcatacatattaaactgcagggatcgtcatgccgtgcaaagccaatcatacgcttcacaatggcaatactgctagaatggagtagattgcggggaataaggaaaatgtcatggcgaaaccagcttgcccacgtttaaaccaggtcaatttcttctatcccggctaatgatgctagtaaaacaggagtataacaagcaccggtctcttccacctttctatctttagaaaagaactcatcaagaacaaaaaacagacccctctttccctgaataactcgatgcgtggtcatctatgataggtccagctgacagacttacttatctaaactgatggttacgatgacttcaacttgtgttcagaaaaccactgaaagtaccagtcctttgacccgagtccaaggggggttactagtaatggcaggatgctcgcatattggtggtttgtacgtgacgccttgatggaaacctccgttgaatgcgaaataccgtgccagttggtacctgaaccgtcaggattacgcgcaagcttcaggtcgtatgttgcaagaatagagtacaatgcccaataaaatgatcgccgaacctctctaccagaatcctgttccatcacgaaccacattacgtttcgtcggtaatgttcactagagcggctcagaaacagcgacgaatcgcacatgaacttggacacgttatagacggcattaaggaacctgccccgaagctcaatataacagccccagaagcctatagcgacaccagacttcacccttgtacatacaccaaccgatcagcagacccagctgccggattcaccttagggaagtccagcgtgttctgtttaatggggctatgtaaagggataccattatccgatgtgatagcgtcctcgttgcactatacttcccaggcttttcccatggtacgcgtgttgtgtagaagtctattaaaatatatccgggtcttttgcaaaattggttctcgtagtggtcttgtagatcaggtctagcaaactcttcattgtagtagaggcacttaagtgtctcacttatgcgacgatatttaagcatatgacagcaaagctgcacagaagtgtgagaagcctttctatactcgcaagtgtggtccccttttagccgctatattctctgggtccttgtctggtctatacgccctcgacgatcggacgactggagcaccgtgttcatgtttctcgcgtcatatgtatgtctagcacgcagttgcggtgcatatttagtctgattacgctgtcatttgctgacgccatctttgtctctcgcgccagagtcggacatagcgtatatggcgacacaggaggattacctcccacaccgccaaaagaatacctaggatgatgcctaggccaagtgcagccccgagggctgcagagaatacgggtgccttatgattggcactgaatgcactattgcaatttagggtttgtaactagatattaaaaatagtaggtatcgaaacctgtatctgcgtgctcggtctggtagtcttcaatgatccagctagatactatgtaaatgtagtaccatcaatgagttgagttggacgtagataggtgaggaggcgtaagtataatattgcgcagctgctgaaaaagatatgcatctctttctacggggaatggtaaggtattgaaagactccgactccgatgtgataaatgcagactaagggaatgtgctgttgtattgtggcacgactgctagatattgaatgatataattcacattagtttgtcacttactgtgatgtgtgtagggaatattggcctttgttcaaatgtagcatggctttcacgtcatctggaacagtttttatttaatccttcttttaactttggagactacctacagggtatctgtcaaaggttcaccaaggtccatcacatattcctggttaacacccatcatagtgacggggtagctcaagaccgcatggactgatttgtcgaacggctgagttatcggcgtggctcttcttccaatcaatgaatagctccgttcagcggaataaaatggctactgagagcgactacagactcgacaaactcgtgtatctattccgaacccaagccagaagttcgtcttatgttgagagcatctgcggcactcggtatgtctgtcccaagatagagtttgccttcacagaagctgacgccatctgtctaggtatggaaaggcggggaatatggcaaatccatggagactgtactgagtacgatccgcgacccttttatcatacaaggatatgaggagcaaactagatgttccttaacaaaacgtactctacatcccacctgttctacctgtgagtagatatggtgtataatgctctatacctgagctcgagtgggtgcaatattgctcataacgctggctcgaaagaaaggctaggattctggccagtaatgtcagaaaaaggaaaaggaaaacttgcctcaattgcatttacctggtttcctaaatcccttattggcagtttgaagaataaatcaaactacaatggccacacagggacggaactcacattatcagggccaagacggattattccctctggtatggcgatacaaggcgacacgagtcgaatgtggtttgttagccagcttcccttttcatgggagtgataagatccagatcgtatccccacgaaacttcctcccctttcctccccatttatttgagtcgttgatataccattgcaacggcgggaagctatattggcctgaccagggcattctgaatcaacgattcagaattatttgaccttttgggcttgtggaatatcgggccctggcgatatctcttacagccatttactttctttagtcgtttcccagggctgaggcacctttactaccatcccgcccacacggcgcacgagggttaccgatatagataccgttccaagattactctctctattatttaggaacatttggatgaaatatcgaaaagtaatgatattaacctcgccaggagtctttcccatctgggtaatctcactacacggaacataccaatgtccgtccgatatgggtagcacagtcgtcggagttattcgtgttattacctgctctctgtcaactgtactggattatacttatctctacgtaccaactcagaagaaacgtaagtctctactatggtagcacgcattccgcattgcaccctggctatatgtacataacagtgggaagcataagccggttggttggtcttcgctcggtcgtacatagactgtcattggcaaagggttctgccgctgaatgatcaaattccacttagtctcatagagagagatccagcgactctggcatttatttatttgatttccatttcaagacgcaaggaggttatatatcgacgtaaaagctgactaccaacaccatcggaagagtacatctgaataattggaatatccgcttcgaaccatactttgtgggaaaatctttgtttgccaactctttcagcactgcttgccatctttcgtaatcctctaaccgttatgccgtgggtgcattcgattggtttgtcccgtgaatcatgctttgcatagcattgatttggattgattgtctcgctaactcgtggaatagctacaacaatgatggtgtaatggcagtcactcgtgccgccgaggccaagcgctctcccgcattaatcgaaacctttccatggacaatgcacttccaaggcccacatttcgtcaagtacatcgtggaagccgcccacgctgcctcagttcctatcggggtccatctcgatcaccgtatggatccagccgaagttgagcaagccttgaaactgcccatcgactccatgatggtcgatgcgtcgaggctggagccggaggaaaacatcgaatattgcagacagatcacggagcaagccaagataaagggaatcactgttgaggccgaaatgggacgtatcaatggcggagaggacgggattccggatgccagccacctcgaagagatctggactgatccacaacacgcggaggaattcacccgacgaacaggtgttcaatttctggcgccttcatttggcaatatccatggaccttaccctgaaggtggctctgagaaatattggcagcttgatcggtatgtagctctctggaccttgggatctgattaaccactgatgcattgataggcttaaattgattgctgatgccattggtcctaccattcctcgggtaattcatggaacgcatcccgtcccggactggctttttcataaggccattgcaacgggggctcgtaagatcaatatcaaccggaatgctcgtgatggatacacagccttcgtggccgagaatgctgaccgcttggagcttactgctttgaaggaacagtccgtggcaatctatcaaagatcagtagaacacttgatggatgtccttggttcatccgggaaggcgcattagctaggtggcaaggagacaccggttaaaacatgtcagatagtcacgtagtttgaattcctacatcagattgattatgttgctttctgttgcttgaatctataaacatgacagtgggaagaagtcgcttaggaagaacaacagcgctgggcctaattaggcagcgtcaacaaaacatctataatatagcgactgagatatttgaagaatgcattgcgagcatgatcgtgacaagagaaccgggcttcaatatttgttcgtgtaaggcaagtaataaacagcaaaatacaaaactgtattgtatatgaggatatagtataagtccctggacgtgcttcttaggataggatcaaaaatacagcctcctacctattagggtatataaagccagagacgtatctttcttctcgcattgttctaggcggagattgtctgcaacaggtatcagacactagtaggacaacatttgcggggtatcgaatataccaattatctacacaagaaaacaaacaagtctaaatgcaaaatatgatgtacagtagagctcttaaaattataacaacacactgcgtccgacaacgccccaaacaccaagctaatgtattgtaccattcgcagagaaagctctagacaatcgcgaccgtagatccagaagacgaaggcttcgtcttgtcggcatggacatgcatctcagtaatctccccattctcgatatcgaatccgggaatctcttcctcaagcttctgttggcgcttgtacatcttccagaagacaacgctgccgtgaacctgggctgcggaaaaggcaatatgaagcagtggggtgacaaccttaaaggcaatctgccatcggtcccagagtgagccgaataggaaaaagataacgatagtttcgcaagttgttccaagagctgtggtgatgcaagataggaggaagaggcgtttcagaaaacggtggcggttggggaagatgcggtatagaatgatagccaagtgggggaagaactctgagataatgtcgaaggcacctgacagaggactattagctttgcgctcttaaagggataataaagaaaggtcgagtatgacttaccccatactgtacacagaacaaactcgatatcggcatctggctctcgggccaaatcaaggctgatggcgatcgcagattggccaataataatcgtgccgatgtgatgtaacacagcaataggcgacagccttgtacggtagatcaactcaaaagcgtacatccctatgagcatctgggcgaccacgaccagcatgtcgcccatagtcacacgggagccatgtgcgtaaggtgtatggaaggacgacttcccaatgacaacctcaaggaatgggtatgccgcgacgattaggattaggatcttcgtcagaccggcaatgtggtggttaatgaacccgcgtcggttcacctcactcaagttcgtatagatagaaccatagagacgttttatgagaaagccctccaacacataatatcgtattacgaaaaggacgacgagtacaatcgaaataataagggcggagaacggagcgagcctcgagataggctgtaacttaagagtctcgagagcagtaatgtcatggtgataatgtatacccattgtagcttgcaaatgttgtcaacgatcatggaatactcgataaactgccggtcattaaaagtaggaagagagtgatgagagacaaggaatgctgttagaatggtccctaataaaggattgatgggtataccaagaacaatgagagagagaaggagtgtagacgggaaggaaacaatgagaaacgaccaaatcgcatcaaatagctttcatgaatctgcacaaatctataaaaggagagccgaaagagaagggaagaaaagggacaacgaacagtagtattccagcgtgggagatctccctcggatcgagatacaccgttctcctggggaaacccccaagtgaaccctggatcccaggcagactagctcatagcgttactactaggaggtaatttgcatatcgatcccgccagtattacccgcaacagtctgggttgtgacggtaacgtggtagcctaccctgggtgccatagtggtggagacgaatggtgtacacccactctaagcaacgccccatcagcgctaatttaatagactagaatctctctcgcccactggtcaaagagtccttaggctatttctgacaagcggtatcgcttaaaccttctgcaatgacgagaagggtctttagtataacctctttcggggcgcagcctcgtatcattgacactggcgagggcaacgggtccgttgcctgctgatcatgcaccgaataaggagcaagccaagctttcaggatccactgaagaaagcttcgcctccgcaccttgaatgaagttctacgcttctaggcagtaacattctctagagttaggaaatgtccacgactgattggtggaggtcccgtgtagccctggcacgtgatggcaggctgcccaccacgccaaaccgttccaggaaaagccccaacatgcgcacgatgttcagtttcatcccacgggggatcagaccctcctttctgcgtggttttgaggtggcctggatttgttcgtgggtctcatttggacattcaagcttttcctcggcactgcgacatgaaaccagtcggagaaatcactacatgtcacacgtggcggagttatgaggcattttcccctttctatttttgtcgtcgaacttccaggcaaatggctgtctggtggcattaaggctaagtcacacaatgacctgtactacatgctcagatttgaaggggccaatatgaaagccggtgtatgagacaatcaagcaaagttaatcagcagccgcacaaatgagcatcctaggcaaggtaggacagtgctgcaacgtaagcctgggtaatcacctgtctgacttattaccacgcttaggtccgcccacaggtttatacaaagtgttgggacgagacatgccgaccttatagttgagggggaaaatcggtgcgatgatgctggccagaccgagatgctcgtgtactaagcacgtagcgtcgacggcatgagggcggtataagaagtcggtgggtgcatccttaccacctgaactctgctccttcgagtaccgagaatattgctacaataagaggcactctcgtcactgacacacatcgattcaacatgtctgcacaacgccttgcccaccctctctagacgtgttctcccatctgatacgacgtacgtgtggagacctggacttacgtcgccccaatttgttaagaggccccagacattctgtccttagggtacaataagatcgacctacatatacacgcacatctctgcgtgactggaatcggatcaaaaggactttgacgacttaccggagatattccgtgagaatccaacgacaaacctaaacttgaagcttatatatatgaaatgaaggaaaggtctccagggataaatttgactatgggtgcgaaccatattctatcatcaaagcgatagtgccaaccacttcacaggactgaagatgcctataaagaccatgtctcggattattctggtacctcctttcgaggacgaattgaataatcattgaaggtttcgaagtgacaaaactagcatttgacgtttaaacattggtccggagtggcgtattactctactcactctagcctacaatttactccctataccccacgctactaacctaatcacacaaaccattttgatccacaagacaaaaaatatattattaatgaaagaaacactacccccttccgcaggtagccaactagaattaaagagtggacgctcacatacatatgagacagtaaggtaatataaaagaacgacacaattaaacccccgaatcatcctcgatagcaaaattcttcccgctctgataagtctcccaattctggcagttcgagtgaagcgaatcataatcaatcagatcctggatctcagagtaccgttccacaaactgaatggcgaagccttcctccgtatgccagccaatatggcagtgcattaaccacgcgcccgggttatcggttacaaagccgatgactaggtggccgtttgctgggagcatggctgtatcacgacggggaggattgttggttgtgatgtcgcctgcgctgtaggttccgcttccctgggagaggacgacgaagtcatgcccgtggagatggatggggtgaggcacagatagggtggtctcgatgatgacaaaggcccattcgtctgcgcgagggagctggactacaccactcgtattggagaaggaggtgtggttgcggtagatctctaggagagttgggtcgtcccaggacacgtgcatggaggtactgtttaacttccagcgatagaggctctgggagtttttgcctaggctgactggttcggattcattgtataacgggttggaagttattgtgtaggggttgacgatcggtacgagattggacatgtcttcgtcatcgcaggcatctgtgtaggaatatcctgttgttgttgttggtgtcgatggagaagagccgtagtatacgattcccttgatgttggtgggattctggttctcggaacaggcctcctgggggatggcacgcagccagaagttcttggcgatggaggcttggtctgcgtggacgatgatgtcgtagcgttgtcctgtgtccatgatgagtgactgtactatatgatggttatggaagttggattacccattgcaatatcgaggacgctagtattgtacggttctataggaaccaggtcgttggcaatgacagtcatagtatggttgtcaatcatgaacttgaaatgggtgtcacaggctccattaaccaggcggaatcgataggactctccctctgtgaaggatgtattccacctagttcctgtctgattggcatagccatcttccccgaagacattcattccattgatcaaggcagagtccagttccgggggtccgtcgttctgtgcgctatcgaacagctgatccactgtattgatgtcccagtcattcaggataataaaccccttatctacatcatagttggcactagcagggccgttgatcttgatgccaccgaacacaccctcccaagcctggagaccaatgtgcgaatggtaccaggtcgagccgtactgagtagctctccacttgtaagtgatggtgctgttcgaagcagtcgggcactgggtgatagataccacaccatccgaagggtttgtgtagtattggcggattccgtggaaatgaatgctagtaccattcttgacggagctgggaagcttgttgttgacatgcacaaccacggtatcaccccagtctgcttcaatggtagggccagggatagaaccgttgatggctagggcgaacctagaccgtccgtctggagccacggtgacatgctcgaggtcaaaccaatattctcgagtgacacccgtctccgggatggtggtggtatagtcagtgttgatgtcatagttgcaccattgatcgcgagtgctggcagtgtttcctgtacaggcaccagaggaagaggtactaagagatgctgatgaagagagtgacgcagagacggagtctcgagctaagaacgaggggacgcttgtggcattagcagccacaatgctagaaagtatacaaaagagggacgatttcatgttgtctcccactgctaaagagtgttgtgggctacaataacaaagagaatgacaatgagttggtatatccgatggttattcggacattggaaagcgctgcttatattctcaaccacaaagaccattatcctagaattctcagtattaccatatgcgatcaaacaagccaagcatgactatcatactctctaacaaggatcagcacatattggcaagatctcattggacatctaggacctgacccggtgaagtacgtggacgaaaaatgcgacctatcgagacgagctgaaaagcctccacacagcatgttcaggcagagtggagcaaggctgaatgctctttggcaagcctatatcggccgtaaaagaccgaatgctactattccacacgtagttcgccggtaggtggagcttatccgctctctcccaagctttgacaacatggaaaatcaagcgaactactcggatcaccatctacccgtccaattatacgttattgccgataagaatactctataattatctagaaacaaacgcttcacagtattgattggacaattacgtatcccgcggtgtggtcgttccccacatttgcagaggaaccacttatgaacaggggcctacgcaatacgcctacgtcctgatgcggtagattatcgcatgaccgcgatgcgctagatctatctacctttataagctcctgatataattgagaaatggttgctttgttctttataggatagagctaaccgttgcccagccctatgggcaaaacaagatccttcttgtggctgaggaacaaacgtcaacgacgcgcattctcccgccaacggatccactcgaacgccgatccatcacagaccaagattgtggtgatcagcatagaatcttctattccggttagtagcacacgtattcctcatggcatccagcagtataccgcttaatcatcacgattgggttgttgtggggtgaaccaaatgccaatgtttcaggaacaggcatagatagtcgaaagtataacggcggcgatatgccgaactattgactcagcttgaccggtgctcgccaatgtagactatagccttgcgtattttcatgccgctaaaaagcaaatattggggctagaagcatccaaaatgatgcaactatggaggaggtttatccggctgaaggagccccgatttatcataagaggatcggacccggtcgactttgtagacattcgtacccaattccgatagtttcggctcgtatttctgacaaggcttccatcatattccagaatatgttgtctttcaaggcgcccctctggttcgtttctttggcagcagtggtcagtacggcttcagctgctcagacgtttggcctatatgcctatggcgagaacgtgggaggacttcccctttactacgttgatggtaagcagcaccagattctattcgtcttgtgagatccagttaataatgtactaacaacacctacaggtagcgccgtcgtaagcccaaagacccccgaaaatggaaccgatgtagccccagtcgtttgtatgtcgccgtctcctataactattccagtcaagctaaccggctcttcagtcaacaaggatagcgacaacgagctcattggaaatccaaacactaccagcactgcatcggctcccgctttcacggacgcatcgctttttgttcctagcgctgactccagtgacaaggagatgggattcacaagcgatccttcctcaaaccaagtcactaacaagttcgtctggtatgggaacttcctccttgtggagaatgactctggggagtacacctcgttgttttctgtcaagaaaagctcgtcgcacgatgaggatggaagctatgatctgtactggaacgtcacggactcggatgaagaggtcatcactatttccatgaggtcggttgcaccttccaatgcgtagagttttatctacgtcggacaaatgcgtggccgtctgctaggctgatagttgctgttgtgtgtggatgatacttggactgtccttctctcgtatatgttccaagacttcttgcaattcccttctttcctagcctttgttttgtattgtctttctcttcttattaccaattgcccaccttcctttgtgcttagatataatataggcgttgccacttttgtaggcgctcctatatataacaatttctcacaaccgcttttctacatctaatgtatgtttccgtgaatgatgttcatgtctgcttgaccttccaatggctgaaagcctacacaatgtatctaaagctgcggttttggatatccgtctcatcggcgtggtccaagccctcatcggtgtgcaggtcaatctcacgggtttcttccggattgatatgcactccctgctgcttatcacgtcgcctattctcccaccccaagtagactcgaaacacaaccgccgaggccatggctatagcataacaaatcacgatggtggtgtaggcagtctatatatagagcgccgcgtcagcatttctttcatcccatcgagagtgggcccgattatgacttagtacgtacaggatagtacggtgcttccgagtccttgaaaaactgggggccgatcaagtttccaacacagtaccccacgaagatcaatgccgcaacggtcgactttttggtgaatccggccgtgttactcgcgtggagggaaagcatgagggggaaaactggcgcgatcgccgaagacatccagtaaccggcgagccgggacagcttctgttccgatggaagcaatttgaccatcaggatacccgcgagggccatagcaaatatcatgataattgcaactaggcgggacttgcggacgttcgtgcagaatatggtcgctagtaagacgactaccaattgaaatgccgaagcgggaagacccataagaatggtttggtatttatcgtagccaaaaccagcgatcaggagagattgaaacttctagttgtcagcttatcgtttgaagcacgagcctgatgataagcatctgtagtagaaaacaggggttgaatccaagcctgggatatacatacgctagtcgtgccgccatttggaacacagatgacgaatgagaaaataagtaaccaccatgttttaggatccgtaaaggattcaatgaattgatcgcggtcccatttcctagtctgggttgttcgttgaaacttcttcggtcgcagtgaagcaaattcacgttcagaagaagagaggaagtgtgcatttgatggagagtctggcaggtaaaaccacaatacaaccgaccatgccacggttattaggccaaaaataagaaacagcatctacatagttgataagctcatttacggatagattcgggcggaagggtaggcaaaccttccattgtgagaagtggtcctgataatgcgcaataccgtaagcaatcagcgacccgatgatgctgaaactggcatttcctgcgaaccaaaatgtgtgacgagagacgtgctctggtggtgtgtaccacattccagttatcaatgagaagcctgggctgatagcgctctcaaacacacccaagaaggttcgtaagaccatcagcccggcataattgttagcaacagcgtggagagtcaagatagcgccccagaggaaactagagcttctcagcgagatgaattcatcatcgaacaagttcaacccacatgagtaagctaaggtatttccccagagggaacttgacgaatccaagtgaaattggatacgaagccgcgagatagcctatgtaaaagatactcgatgcccaactgtattcttgcccgacaaggttctttcggtggtcagtataactgccaatatttaaccgtcaaggggagcagtaataacataccagatcctcctttaagcctagaattgcactgtaggatagacttgtctctgtggagattataagcgtcgcacgccaactgaattaagtggataatgctgtactgactgtccaggaactgaaggccgtaactaataatgaggagtggcatcaaactaatgatgtgagtcaggaaggtccaccattaaatcacgaagttaactcactgaagatcgatcttcctcaccagtctcttttcctcttccgggccaagtacatcaaccgatccacgttctttctgtccgtcgacagtgtccgaaggcgcggtacattttgtttcccggtcaatacaagatcgaggcttttccgccatgacaaacgacaacggctgagacctagtctagtgatcccttgttcgcgattgctaaggtgtgaaattgactgcaaaccaaagtcaaggtcaagatgggcgagagatagaagagttaagataccgggtcgggcaccccgattttatacaagagagtcgataagaacagatacattgaacctaagatgtcgtggataagaagtgacaggcgaaggaactcggttcaagcgtggccattaggttgggaggttcgttgccggtaatcgacagccccttgctttcggtgtggagatgatgccctacactgataatcaggacgagatgattggcttgtttaatcgacgggagagggccgaggtcggggcgaagcgtcagtggcggacctcccgactccggcttttaaaagactgtctccacccccgcaaattgcgggcaacccccagcttgttgaccttcaccacaaagagatctttccagtcgaaaagacctctcgtgacagactaccgagtgtcaatcgaacggcattagccaaccatacgagggatacgttcattgaggacgccaagactgcagggatgccaggagaaaggcgggaaaggaaaaggcaaaccgctgcagccaaacagtcttatcccagttcaccatcaactattcgtcggacggcgtgcatggtaactggagagtgtctctttgcttcctgcacgagctgaaaaattcttctaagtgcggggtctgaaagatgggttatgatccaccctcgatgcacaggatcgcgtgtctcaactcccccgatgaacagagaccactgaaacctttccagcaattggatgggcccgagggccactgcactgtatgcagcagtgaccaatgagctgagagcgcagctgacttcttccggaacagggtcagtgccgaaggccgattcacagctccggtgaaggtagatttgcagagcataaaaaaacgtcacagtaacacactccattaaagacacaggacaagtgctcagtggttcgctatttgcgaccagcgaaaagatacaagagtattcctattttggatcagtcaaatcctacgacacaaaatttgtatgcgcgaccgtatgtacctttttcagctcatctaggtgttgctttaaccttcgttcgtcaccataccggtgtagattcccggtttggctgtaaatattgatttcatggtggatggtaatgagcatgaaataaagctccaatatagctgcttcgtggacctctggcaagctgtcactagtaagcccgttctcttcgggaaacaaaagaaatgcggtccgcgagagcctccagattttacgcctcttcgagtagtcatcattaacaaatgtagcgaaggagccaccgcatccgaagaaggagcagaagccatcgcgatcgtataggtatgtgaagatgcgcgcgagaaggacttgatctggaattaacaatccagcagcgaaagtctccgagaagacattcacgtcatcattagtacacaactcatcaaccttataagtcctcacatagtccactactgttcgacttagttctcgcagcttttgtggggcgggttggtcgcgccgcatccagaacatatacatatacaaaaaggagagcatcatgttcacgtggtcagtaggcccccgcggagttgaagcataccgaagcaactttgtaccttggtcgaagtgcagataagacttttggggtagaacgagcccattgtcatagtacagtgataattcactatgagcgacggcgaggaggaagtggagcgccattttcttgtcgacaacatagtcaacaaaaagagattgggcagattgggcaggggtacgtgttgacttcagtggcccaaatatagtccgatggaaagacaatgcatgcatatcatcgacgtcatgtgttgggatgccatgcgtgtagttcatcaatagcagaggcatagggtccaacaggttgattggagggcaatagtgtagcacgcggtattcttcttggagaccagcttggcgccccaatctagtattcggaggacttggtgttgactcttcatcgacttgttgttctggtgtgagtaacggcgaagggcttaccaccggcccaatgatggaagagtctctataactgagagacgacaaagacgaggaaatactcatttctggcgcgaatacctgttccctagagtgtacactagtacttctcgcttcatgtctgtcttcgtttgtcttcgatgaacccagcccgccgctttctagggaggccggactaatgctagacatctcccctggctgacaaggtagctttgagttcggtaagataggtggaggagtccataactcgctatccctatgttttattgggccaaaccccctccgtctcgaagacaaaggaggtcgtgggggagcccattcgcactccaactgaagacgcacacatcgaccgcagataggacgctgttcatcacacttgactctcttaccaacacaggttcggcagcctcatcgtaggaatcatgtcagtatttctaaaaagaaagtgctggtctccatcacggaaagtattgattgctcaccatccttcgagcgtttgccgcgctctacgcgtttccgacggggtcgaacggcatcacgctgatccattgagcctaggaagatattctactctgcatactggtattgtttaacttccgttgaagctcttatcgttattgggtggaggagataaggagtgactcgccatgcaggtattttgattaattcttaaaaccgccctccacatattttatctcccccgtgccggtcgattaaacggaccaatcatatcacctcctcgtcacctatcacaccttaccgcagcgcaacgagtcgcgagatctttttccattagttgaacgaagacttgatcttttgccctatcatttatttttatttatttctcagagtttccattcgctattatatatactttccgttattttcgttaatgtcttatgtacctcaatattaagatttcatcactccagttcgatttgtagtatacgtcaataatatattttgagatcccgcatctaccattcgcggaaaaaacctcaaaagaccactaaaagcatcatgggaaatgtactttcgggttaccagtcagctgaatgcgaagtcgaattgttcaacaatgccggaaaaattcgcggcctccaatttgacagcaaatctcgacgatacgctgacattccttacgctttaccaccgactggtgattatcgttggcgaaaaccacgaccattgccagagtctttctcatactcgtctccggatggaaccccatacgatgcgacaaagttcggaaaggtctgcttacaatccagttactccgcctctgtgaagaaacaacttccgcaacatatctttggagaggactgcttgcgcctgaatatatggactccggtcggaaagcccaacgagacgaatccgaaatggccggtgatgatctggttccatggcggatggttccagatcggtgaccctagtcaggaagagtcgatggacccgaccgaacttatctccacaggtcagttgaatgctgtctttgtcgcggtgggttaccgtctgaatgtgtttggattcctggcgggtgaagtattgagagaagaatccggcggacaagaagtgggcaattacggcctttgggatcagcgactcgcaatggagtgggtctataaaaacatctcagcctttggcggggacccagaaaacattactttgtcgggacgcagcgcgggcgcatacgccgttcaggcacagaccttgtatgattttcggggatcgatggacgagtcggctcgaagtcatttccgacggcttgtgatgtattctaacgcgatcccgactcaacccaaaacgccggaagactgtcaaccccagtttgacgagttgtgcgagcactttaagatatcaccagaaataccagggcccgaaaagctccagaggctgcgccagattgatgccgaggagttgtgcgatgcggtcatgaaactgaagcatcacacgttccgacctgttactgatggtgttttcatccaccctggcatctttgaatactatcgggatggatcattcgcaaatgagttcaagagacgtcacctgcgtttattgatcggagaggtgctgaacgaggaaacattatacgccgtgactaatggcccacaggccaacagagagtcgctggagctccaggtttccaattattattcaccatcgacgacatctcgattgctgcagcattaccctcttcctgactccgaccgaaaggaagattgggaaggtgtgtttggacgaatcatctccgatggtcaggtccgggctccgtcgcggttcttggtccataacttactacaacatggggtggatattaaggatgtgtggcggtatcttattgcataccgcatgtcgttcattaccgaaaaggtagcccctgctgcgtttggagtgagccacgccatggatagaccaatatggaagtgagtataaggcataacagatcccccggtcttcgtttccagacgcacatttttctaaacgttatttatctagttactcagtgatgcatggcccgaatcctgctgagcggcagctaatggacaattggattcacgatttggttgctttcgtcaacggagacaatgaccactcctacggcacgaaggaatgtgacgagtataaggtcatgacgccggatggcaacattgaaatccagaaagatccacgttgagatgaactgctgaatttgatggatgtgttctctggcttttcatgcgagaattaaattacccgtgtgtctagtcaataatgcagtgcatatcgtgaaggcttctttgcaacttttgtgcaaaatgttcgtagtggttacttatttggaaatacctattacgaagtgcgccacatgtcccgtttagtataggctcttaaccttcatatacaggttatatgtactaaatttcgtagatttaagacagtagccttagccgagagtgatataacttaccaacataatggctaccaagggaggtccagatatactcagtatgttaggaggaacaagacaagtgatctcaaacacacctccgagtatcatgtatattgagtagggatacagcacatacttcaagggcatgctacgatgcatgcaaagggtatacaacccacccttgtccaccttgtcgaagcggagtgtagattgctttcgtaatgtccagataaattcagatgtatccggttccattgaacgttactcagtgaccacatataattctgtgtgttgtagtacctgtgctcgtgccacgagaacggtatatcctttcgatagaaagtagccgtaccaggaggtcgaaatatcccgacgtagtcaccggcacttaaagtaagatgaccggggattgaagggtttctcgggggattaagcatatgcgataatctctgaggctaagccatggctattctggccagacccgcccagtcagataggataataggtatattgcaggtgcttggaagaccgacgttgtatcctggtctacataggagttgcactccctgctctcgtgcatatttgttgcacggcctatctataaggcatggcatctagattgtgtgtgtggattaatggaggaaaaagcatatttgcgggttgtagcatgaaggcaccaggtaacagctggagaagctgggcggaacatccgccgagaaccaaccacaatatatggaggcttccacgcatagagaatataccgcacgtcttctaatatgtatgacgtgatggggctgatgagaggttgtatcgaaattgctcatttacatagtataaagtacctatgacctattagttaagggaatatacccctcttttgttatagcttcgcctctctacgattgttctgtttcagtaaccgttggtaaataactcccagaagagtcagccttttttgtctagatacttctgcaagtatggaacaatgctgtagcaatttagcatttccagaagccgcagaagttaaagaacccaactcagtccgcaggccggctccagtccggttgaacagggacaaagtgacggagtacgttgccgacaatgtcagggaagacccggtccccttccctatcgccattgtggggatgggaatgaggcttcctggtggagtaagctctggaagagaattctgggattttcttgtcaacaagcgcgatggcctatgtagggtccccgaaacgaggtacaacgtcgatgcattctacgacgaggcccgcgaaggtgccgtccggacgaaacatggctacttcttagagcaagatattgcgcaagtagacgtcgggttcttcggtataagtaaacttgaagcggaaaagcttgatccccaacagcgactactgctggaagtagtctgggaatgcatggaaaatgccggccagacgaactggcagggtacgaatattggatgcttcgttggcgtctttggggaagattggttggatctcttgagcaaggatacacagcaacacgatagatatcgggtcatgagcgctggtgattttgcgttgtcgaaccggctttcatacgaatatgacttgacaggacccagcgtcacagttcgaacaggttgctcgtcgtccatggttggtttacacgaagcgtgccaagcaatttacaccggggattgctcatctgccattgttgctgggacaagtcttatcatgagcccgaccatgacgacaacaatgtcagaaaacttagttctctcgtccagcggaatctgcagaacatttgatgctgcagctgatgggtacggaagaggcgaagcaattaatgcagtatatatcaagccactggatgatgcactagccaatgctgacccaatacgtgccattatacggtcaacggcggtcaactgtgacggtaaaacacccagcattaccacccccggttccaaagcgcaagagagattgattagacgagcgtataaaaaggcccacatcgaaggtgatgatattctgaagacagcgtttttcgaatgtcatggaacaggtaccatagctggagataccgcagaaacaaccggcgtggccaacatatttggtgagaagggaatatacatcggagccgtacgttattgttgctgttttaattcagttcaggttctttgattgttttgaagaccgcgaccgctgctaatcccaaacaggttaagcccaatgtcggtcattcagaaggcgcgtcgggaatcacgagcatcatcaagtgcgtcttggcactagagaataagatcattcctcccaacgtgcactttcagacaccgaatcctaagagtgggtgctacatggcgttctctggacggatatgcattatactcactcgttgggttcttgatatatagttcccttcgagagtgccaagctgcaagtgcctgtggagccaacaccgtggccggccgataggaaggagaggatcagcgtcaattcattcggcattgggggaaccaacgctcatgtacgcatgcatacctgggaatgttgcatcagagatctggcatactaaatctgtcaggttatactagattctgcatcttccgtactgcgcaaaataagtccagaagcacgattggcctctgagccagactatcagctcttggttctctcggcaaaggaaaagaagtcgttagatgggcaaatcgaaaggataacgaggtatatcgaagctaatacatcatgtttgaatgatttggctttcacccttgcgcgaagacgagatcacctgccttacagagcttttgctgtaactgacaaggatggatctcttccgacatttcaaaaggcgcaatccacggttccatgcccagtattcgtattcactggccaaggggcccagtggcccactatgggaatgggccttatgggtagattcccaaaattccgcgaagatattcaccagatggacaagatcttgacggagctcagggaagcgcctccttggagtattgaaggtatgccattcccggtattttaaactgcgaaccctcattcccactgaccaaggccagaggaactctctaaagatgaggcggttagtcgagtgggacatgctgaatttgcccaacccctctgcacagcgattcagattgctctcgtcaatatgctacgggagtggggtatcgttccatacgcggtggtgggccattcaagtggtgaaatagctgcagcatatgcgtctggggctatatctgctcgtgtagccattatactgtcatattttcgcggccaagcggtaaagtttttgtccaccagtcatgccggtgcaatggctgctgttggtattagcccagacactgctcgcgcgttcttggaagagggcgtcactgttgcatgtgaaaatagtccagttagcgtcacactatcaggggacaaggaagccttggaccgtgttctcaacagaattcgcaaggatgatgagaatgcaatgtgcaagcgtcttcgggtggatgttgcctaccattcacaccatatgctgcggaccagacaaacttacgagtcactgatatcaccatatgtttgtcacaatagctccatggtcccgctttattcgagtgtaatctcaacgcctattactgaaccgagcagacttgataccatgtattggtcccagaacttgtcatctcccgttttgtttaggaccgcagtgcagggtctcctggatgacaacgggccggtaaagttatttctcgagattggtccgcactctacccttgctggtcccctgaggcaaatattccaagcacaaactagcaagaacagagctgccttatatgttcctacattatgcagaggaactgaagagtggcaaagcctactggcgacagccggccatatgtttacgcatagcattcctatagaccttagcaacattattcctaatggcgcggctctacgtgacctccccccttatttctggaagcatggtgagagattttggaatgagtcacgtctggcaaaccattggagactacggcaagaacctcaccatgagcttttgggctctcgggtgcttgagtcatccagtgttgaaccgtcatggaggaatatcctgcatatagaccaggtgccttggcttggagaccataaaattggcaaggatgtggttttcccctgtgcaggttatgttgcaatggtgggcgaagcaattcgccagataaccgagttaactgaatactcagtgagaaatgtgtttatgcgcgctgcattaacactagagacatcaattgcaacggagattattacaagtctccgaccagcgaggcttgccgataatattgattctgtatggtatgactttacaatatccgcctatcagaactccacgtggaaaaagcactgtattggtcaagtgaggcctacgtcggaccagacattcaaggcaaaaaggatcacaccataccctagactggtcagatctgagaagtggtacaacgccttagaaaaacgtgggttagaatacggtccccagttcagaggactcgagcaaatctcggccagtccgtcaagttatcaagctgccgccacgttgcaggatgatgaaagcttgtacgtgagtcactattcactacacccgattatcatagacgagagccttcaactgctcagcgtggcggcaacccatggtatccctcgccgaatgacccgtttggcaattccgacggctattgaagagctttatgtaggcaacggaagaggaacaatgtcactcaatgtctcctgtgacacctcgggaggcatgatgcgtggaaatgcggtgcttgtttccgacgaccaagtggtactctccctgcatcatggcatttttttcagcattcaagaccctgatataggcaatccccagcttccagtagctgcgacaattcactggggtcctcacatcgattttgtacctgctgaaaaattgttttcttcatcacagaacttcttggagggtcgccgtagagtcgtcaggctagttggcctttatggcgtggaatactattatcagacaaggtcctcccagcccacacaggcacatttgagtaaatggctatcctggataacgtctaactataaatacatgcgtgacaacgcacctgtgctagtgccggagctgagagacatctgttccctgagcccggcggaacgcgctgcggagatcgagggtcttaaatccatgcagccacaggatttcggctatccattttatgtcttgtgcagtcggattctcggttcaatccacaagcttttgggggggcagctggaacctattgatcttctggtagaggatggtgcgctcaaatatttctacgagcaatccgccctgaacggatcctggcacgaatttgcctccttgcttgggcattcctatccacaactacgagtgctagaagtaggaggtggtactgggggggataccctgattgccttgaagggtttcacaatggaccacagcaataggctatattccacatatacatttacagatatatctcctggattccttctagaagcaaaggaaaggtataagtcttatccggccatggaatacgctaccctcgatatcagccgcgatcctgttgagcaaggtttcgagcctgaaagctatgatttgattattgcggccaacgtgatacatgcaaccccgagaatatcggaaacgctgcgaaatgtccgcaggttgcttgtgcccggtggtcgtcttttactgatcgaactggcctgtaccatcccaattatcgactatatcatgggtatcctgccgggttggtggctgggtgagggcgatgggcgagaagagcggccgtatatgtccgtggacaaatggcatgacaagctgttggacgctggatttacgggcgtggaggcttttaggtatgataacgaaccgccgtatcatctgaatgcacaaatcctgtcaagggtgcctagtgccaagtcacccgaaaaaggagaggtctcccttctctatctcactgagattcacgactgggcccgagagctcgcgagagaccttgaaaaggcggggtactcagtccactggtgcacattaaagcaagttccgtcatctggtgcaaacataatctcagtaattgaccttgagggtcccttttttcatgaactctcgccagccgacttcgaaagcttccaatcgtatgtttcgcgcttggcagatcgtcatctgctatgggttacgcggtttgttcaaatggagtgtgacgatcctagatacgcgttagtgttaggcttagctcggactattcgacatgagattatgcctcagtttgctaccatcgagatcgaccaagtggagagggcctccctccaacctgtggttcaggtatttgagcgacttctgtctcagctggatgatcctggtgcggcaccagaatatgaattcgctgtccgagaggggagtgtacacactccgcggttccagtttaattcgtttgaggaacaagtcggggcaggagagagccaaggcccgagaatgctggatattgaggcctacgcgatgcttgattcgctaacgtggacctgtgcagatatgacgtcaaatgacctggagaaggaggaagttgaagttgacataaaatatgttggtctgaactttagggtgagaattacgtgctatgaaactcgtgcatatagtaatcaatctaacattgataggatctgatggttgtgatgggcctcatgggggatatggcccaggtcggcttggaagctagtggaattgtgcgacgagtgggatccgctgtccaccagttttcacccggcgacaggatcatgatctctcatcttggcctcatgtgtacccgaacggttgtacggacagaacgatgcgtccaaattcctgacaacatttcactggaggatgctgccacaataccttgtgtctatgcaactgtggtctactctctcataaccgtcggcggcctcaaacgagggcaatcggttctgatccattctgcgtgtggtggggtgggtctggctgcggtacagctatgtcagctaatcggagctgtgatctacgcgacagttggaagtgaagacaaggctcggcatcttgtagacaacttcaagatccccgctgatcatatatttgactctagaagttcgtctttccttcaaggtgtattgcggaagaccgatgggcgcggtgtcgatttagtgctcaactctctatccggtgacctactccatgcatcttggcaatgtgttgcgaagctcggtaaaatgctcgaactggggaaaagagactttctgggacatggcctcttggagatggacaggttccttgataatcggtcattcattggaattgacctcctccaggttctcgatgagaatattggtgtcctgcaagaaatgattggatgtgtcatggaatacttccaagaaggaaaggcgggtcccatcaacccagttactgtgttcgatgctgccaatgtagtaaaggctttccggtatatgcaaagcggacagcacatggggaagattatcgtcaaaatgccagacctccctttggctcttccggttgcccgcgttcacgaaatggccgcatatttccccgcaaacgcgtcgtaccttcttgtcggtggtcttggaggcctcggtcgtgccgttgctacctggatggttgagaagggagcccggcatttagtcttcctttcaagaactggtgcaaatactttcgaaagtagctcttttataaagaccttggaatgccagggctgcgatgcaattactgttgtgggcaacgtaggatatattgatgacgttcagcgtgcagtttccgcggccaaaacgccaattgcaggggtcattcaactgtcgatggttttaaaggtatctcaaattgactgcattagactacagattgactgatgatttctatcccacaggatcaaagtttgcacaatatggttcacgaagaatgggtagcagcgttgtatcccaaggttaaaggaacatggaaccttcatcacgtgctgaaggataagccattggacttcttccttctaatgggttcaatggctggtatcattggatggcctggccaagccaactatggcgcagcgaatgcctttttagacgcttttgtaaaatatcgacaatcgctgcacctgccagctcatgcgattgacctcggcctcatgggggacattggctacgcttcagaggcctccctcgtgccgactttagaagcgtcgcaatccaattcgttacgagtgcttgacgagcggcaattcctttgggcagtcgaggttgcggtattagcgcaacgatttcaatgcccaaatcaggtcgttgtcgggctcggaactaccaggactctatcttccgcagactttgcatcgaactggataaaagaggccaggttcggtatttggaagaacataattgccaccatggaacaacccgcagaggcctccagagctgatgagctcagggaacatatggaagcgatcaagaacaacccgtcacttctagatcggccggagacggaggaacggattgttattgaacttggaagattaatcgcgtcctacacatcgcgaccggaagatatgactatagaggaattgtccaatattccaatcgattcattgatgacattcgagattcgcacttggtttcgccgccatgcaggaattgagattacgttagtagaggtctcaaactcagggactgtcggtgggctgggtaagatcgctgttcagaagctgcgcgacaagcacacgtgcaagggtcacaaaggcagtgaaagccaggatggtgactctgacggatctgagaaagagccgagttaccatgatgacttaacgcttgctaaaacaatgcgacccatttctaataacattccggattggacctctgagtctgagggaaatgtcttctttactggtgcaactggcttccttggtgccttcctgctgtcggaacttatcgccctaccacacatcaagcaaattgcatgcttggttcgggcaaatacatccgacatgggccatacaaggattaaacaaacctttgccaattacgggcttccagtcgactttagatccaaggttatcgcaattcctggcgatgtgaccaaaagaaatctcggtctacggccagaaaccttcagtcacctggcgcagtggtcgagtgtgatctttcattttgcagggtatgccaattacaccttgccttactctgttcacaggggcccaaatgtccttgggctcctcgagacccttcggcttgccaataccgagcgattgaagcctatccattattgctctagtatctccgcgtgcggtatcagcgaaaacctcattggccccgtcccagaggatgtccgacctcgccccgagtctcagaatgtggcacaaagtattggctatacgcaaagcaagtttgtcgcagaaagtattgtctgggacgccattgagaatggtttcgccatagccatataccgaccatcacttgttactgggcacagtcgtacaggcgtatgtaagaaggaggatataattaacagacttctgtctaactgtattcggcttgggtgttatcctcatccaccccagcagcggttccactttattccggtagactttgcttgttcggcggtatcccggatctcattaaacaggtctagctttggccatgctttcaatatcacccagccagaccaagacaaggtcataaccctcggagaggtctacactatcttgaacaactattcccctactcctctcgtttccattcctaccgccgaatttattaaaaggctaaccaagaaacgagactcactgattaaagtgtccagttccattctggcggagagactcgccgggcacaggatttggtgggatgattgggagtatatggctgcttatagcacggagaacctccgccgagcgatgactgatcacccagatattataggactcaagcctgttcccgagctgctcaaggtctactataacttttggtcgagagttgattgatattacttctatacgagatggaggagatgtcgaccgatgtgatcgtgggtctaagacagctataccttggtaaggctcactagcttcctcgcctacattttgcgcaagggtatctgttgtcactaatgcgtattaaaaccaggaactgcttctgacgagctgtttgacattgctgtaactctcacgctcattaacaaggcacagatggccgggaagctgggtcgatctatcactaggagactcaaagccaactacctcgaaaacaagccgcaaggaaattccgcgaaatacgccactttgcacgacagagggcgatgggtatggtgtgaagcgccggatctttgtaatcctgtatataagaacagtaccaaacgagcaccatgaggctggtgttttaaacgtttatagagataatagtaccgtgttgttagtaagtataggcatatagaggtatttcacataattactccgtgactataattctgtaaatcattattgtacagattattaaaccatacctctgtaatattcctatgtctccgtaaatcggttacagtttcagcgtcccaaccccacccagccttgtgaagtgcatttagcgacgaccaagattactcatttcttgaccatacccgtttacgacggacgtacccatactgtatactgcacccaaattccacacatgcctcgtctctgaccgccagtggacaagcttttactctggttctagacatatcttaccgcataaagctacctgatcaagccgtatatgtcatagctactgtgaacccatcagactactaagcattggagcttaaataacttccacgcctggtgaaggagcagagagtattatttttatgtttgtatctcagtgattacgcttggatataatacaagctactcaattaatccgtaaatctgcatccctaagaatagaaagtcccttcactgcgatctttgtggtcaaatagagcacttgtagattgttatcatctatcgattgatcaagagatcgacccgcgcatagtccaaatctgcctcagtggcttggtcgatagtacccaaaacttaactacttgctgtagacccttgaagcgctttgatccaatgaatcatgtttggtggccgctttgtcttataaattctgtccccatcccagagctatagtaggtttctccgggaagcccgttctcccttcctatataccattaactattccgttcaaagcagtcaaaagtatggtgaacatcattatccctttaagcatttactctctcatctttgccctagaggctaattgtgcgttacgtgtttcttacccttttgacatgcgacacaaatatgttcccgtctataatcaatgctaacaaaagtctttgcgaaatcttcagctatggccggtgccgaaaagcccttgctacgacgggatcttgagtgtgatctctgcaaacgtgtgattggggtagccaatagggaatttaaaggcaaccgtgctgaggagcctatcatacaagctctggaaaacgtttgcaagtttgttccggggaaggagagatcaaaaggcgatgaatttgttgaacagcacaccaatgagttgatctctataatggctgaacaggtagaccccagtagggtgtgtgcccttctaggagtttgcttaatctagagctgggcaatagagtactggatatgctgctggttatcttcggatcaacccctggggaattaggaatgctgtaccttcgagattggttgttgattacagtgacctcaggttcatcattcttatgtgtttacatgtacagtggccgttcaaaagtacttcaataaaaagatccggatgattcagccatcgctcctgacgatcataactctggttatatgcaagatacttaagttagtaggaggattgtgtgtttagaagactcagatgaagcaaccaaagcacggaaagattgcagatagttcaaagaattcaaaccctcatccaatcgtttaatgcccgccaccttggtgtacgagaaataccgatttgttgtcgataggatctataaaaactactagatcaacttcttctcttcttctaccagcttcattggctttgactcgcgcatttccagatatcttcatgggaggggagacgaagccgcaactcccaggcagctagtataggctgtgtgtcaaacaatatccactggaaacattcaagcactattttttcgtaactgtgagctaactgtccaatatttaggcaatagtggcttgagcgctactcactccatgttgaatacaccaaccgccgccaagactcttgcttaacccaagccttccacgtatctctgcaactgtcgtcatcgaggccagacctcgcattgaatatcgagctggtctgagccatgtggaggcggcagagtgtggtgagaatgttcctctggtactggagcttcaagaattcctctcttgtaccatgaaacatctggcataagttgaggagaaaaatgccttgagccaaggggaggtctccgttcagaaggctattatcagttatctgagccgtatcagtacgtttaaagaaggatagcgcaggtcacagatacaagccgaccttttgaggcattacgcggtggagcatcaacatggtctcagacacttcctcacggtagcgggacaccgaataattacatcccactgcaacgatagcggcgacaactatccacgattcgggggagggggcaaaggtagggaggtgaaatagcggcagctcttcgcgacagaattcgaaatacatctgcatgaatgtgttcagaatttcggcatctggaaacgcctgcaactgtgacgggtgcgggtgttgaaggtgaaatgtgtagatgttgttgtaggcgccttcagatatgggaggcacatggtaatattgctctgaaacaagtaatcacagtcattgaccataaggtcggcaagtgctacgaccgaactctcctgttctcgcatttgcccagcagtgtcagtccgggctgcctctgtacctttcccaggcaattgggcaaccgacgctgagatctgacatgttcatagtgatctgtcgccctgatccgagtcgcctgaatggggtgaatgagggaggagcactagttcctcactatcggttgtatgtgcagcaacctcagcactgtcatttggcagtggattatccaacaacccagctgtctcctgcgagctccagaaaatgaatgggtcgaacataaaatcgaaagctgggtcttgctgtgaccatctgctgagacggttcagctctgagttgttataagtcccagacgaattgacagcggcatcgacaaccccatcatagctggtgtttgctggctgggtaatatctactgaaggggtagtgatactcccttcgacatccctcgggcggtcagctgcagacatatctggaagccaggatgcatagttccccgtctcgcctccctccggggctccccctgggtggactcgtgcgtctgcacggtggatagcagtccgcgtatcatttcggcgatcgtaggtacagctctggccctttctcgcgcactgcgagcatggatccagcccgtcacaacgcttcttcgaggtactgcactccttacatgcgtgagctgcgcgggtggattccgccgtcgcacgagtggcatgtatactggaggcctcctttccatggatgcccacgtgtccttttaaaaatccctgaacaggtcaaactttgcgctgctcattagggcgttgcattggatccgatctacttactctctttggaagctcttcgaacaaaatgggcacttatgtggccggccttgcagatttaatgacggcgggcatggagcattagatgttgtagtcttctaaatcgggcgccacactgatcacaggcgagttgatcttttgccgtgacttgctttgggcgggtgagactgccgacgattgatgctggtcggtccatgtttggacacgattgcgttgtcgtttctatgtcttacatccggcgtatccatacatttgtgaggttaagacttaaaggggtttgggcaagaatttggaaagggcggggaagctggggtctccactttgagcctttccccattagtgtccatgagtagctgtacttagggttcgatcacagactgccctacattggaggaaatcaggcgtaatggcatatacacatttacattgcttgagcagagtgtatgttttgcaaagcaggtctccaaccatttactctataattccagtcaagttataccattatactattccttacctcaaagaatactgccttaaccaaagattaagtagaaccaacttcacattgttatatagaccctcgtgaattacgaccatactcaaaactccaccctaagaacaagtttcacccattccacacagcccctagttatgcaaccgacgctagatctatgttgtggtagtgattccccgaccacttcttcgcttgccaaccacttgcaacacgtctatgccattatgtattgacagcaaatgtttgaatactactgcaggggctagcccaacataaattataaaataggcaatgttggcgagagatttatttccgacacaatattatatataattggattcagtgagggttgtgcgaccaggtgttgaagtgcattgctcaacactacactaaacaatgcatttttcagggttcattcctctggtgcattccaaacttggcgctcaccgctatgactattgtaggaatgcgaggcattacgccgatcatcttaggcagccgtggctgcctaagcccactcatgatatataaaaaaggataaaaatacgcaaccagtcattcaatataaacaactaatacggattaccgaccctattatttcttcataagttgtcctatcccatcccaagtcctctcacgagtcacaatggccacaacaacagcatcattctccaaaaccctccaatccctaacccaaagcaagatccacgaactaaaaaaacaacgcatagcatacgaatcccagaaatcccaaatcctcgcctccgcagctcaacaatcggacccccgagatagagtagcatgtatcctgcagggcataaaagcaatccgctctgagaacgacaacttgaaggattccaaaatagccaatatcgagcgatggctggaccaggcgcggtatgactcgtccatcccgcaggagaagttggattcgtttcaggagcatttgattgctacgctggatgctcagagtatgaggttgaatattgcagatttgtattcgcggcttcttacggagtggatggagccttcttctgtgtccgatcatatctctgatgaggaggaaggttatttggtagtcgaggagcggcagaagcaaaggttgcagcaattgtgtgaccagtttgagaaggtggtgtttgagccattggagactgatgagaatgagatccatgggtttattgacgatctctttcccagcgaggatagcagggtggctctggataatcttcggaagaaagttgctcatgaatgctctgagctctggcacaaaacggatccattcaacatatactccatccggccctgtatccgtggactcctgacagaggaccttctcagcgaggaaaaacaggagatcctcaaatactgcctggataataccgtcgcattgactgaaatcacggacgtgctgaacatgcgatatgcagacctcaagaactgggactggcatgccgaggacgggatcccggttttacctcgccaacaattgaacggcaaataccggatctggatcgacgacgacgttcttcagactattttcactcagtacattgctgtccgtctgtgctcaattgtcaaaaccatactgaaagagtttatcgagaagaaatcggtctggaattggcatccaagcccgcgaatgacggggcgggacagcctgcgtcgacagtactacctaagcgattacgacattaagagtagtatcgaaacgagccggaagaaggactatctggagtctgatttcctattccacatgcctctgaccgaatcatctttatcggaacgtggcatgttgtacgatgacgagaacaacgaggacggctcagatagaggcatcaatggaccgtcgaatatcaagcagcagcttctacggaaggtcgcatcccaggtcctgcttgagcgacaaatctatggccaggcggtggtggtccagtccgacatgaaatggtacgccactgcgctgccgcatagcaccatcctcgccgttatgaagttcttcggctttccggatgaatggctcgctttctttcgaaagtacctcgcagcaccactgaacttggatcattctgccgaaggacggatgcagactgggcctcgtatccggaggcgaggtgttcccatttcacacgcgatggagaagttgaccggagagctggttctctttcctatggatctggccgtcaaccgggaaacaggtttactgctgtaccgcatccacgacgacctgtgggtctgcgggaagccagagaaatgtgctagagcatgggaggtcatgcaagattatgccaaagttaccggactagagtttaaccggggcaagacaggctcagtatacctcaccgacaccccggaccctcagatcacagctcgccttcctacaggccaggttacattcggatttttaacactcaacgcagagtcggaaacatgggagatcgatcagtcacaagtagacgcacacgttgcgcagctccagaaacagctcagcagatgcgatagtgtgatttcctgggtgcgaacatggaacagctgcatcggacgcttcttcaagaacacgttcggacagcccgcgcactgcttcgggcgcgcacatatggatgccattctctctatatacgagaagatgcaaaacacattgttcaacgtagaaggggggcatagtggtaacacggtaacagagtatctacgaagaaagatcgaatctcaattcggagtctccgatatcccagatgcattcttcttcctccccgccgagctgggcggtttaggcctgcgcaaccccttcatctctgttctcctggtgcgggattcagtggacctatccccggtcgaacgtatcgatcgcttcaagaaaggagagcacggcaggtacgccttcgcaaaaaagaccttcgaagaaacgcctgagaaaacacgccgccgtcgcgccgaaaccgtcaacccccggcccaagtcaggggaacccttggttatcaccgaggcggagatgcacaccttcatgtctttcgaggaattcacccgatatcgggagtcacgaagcaacaacctgcgagtcttatacgaggatctgatgttggtcccgtatacaaagactatccagtcaacgcgggagtgccgcgatgctcttaatgcggtctgtgggcaattccaattgtctgataagaatcccgaaatgaaatggatattgcagctttattcggacgacgtgctgaaacggtttggggggatgactcttgtggaaaagcggtttctgcctgtcgggattttgtcgatgatgaaggagaagagggtgaagtggaatatggttttgtagttgcctttgcgtgggagttaattggtccgtctatacaagtagtagtcaaatagtcgataacttctgagcccttttctaagatggcgaaacttagatatacattcagtacgtctcatctgaggtctccgttacctgcaattcgaatagttctttttatcgccatttgaactcatatcctcactgaacatcatttgaaattaaatcttcgccactgtctgctcagcaagtcccccattctccaccccctcaatactactctcctcactctccaccggcgtcttagccctaacaccaaaacagtcagcaacccaatccaacccaacccacacaaccaaaagaaagaaaagaactcagctaaccctcctctccttcaaatccaactgcctaatccacagcgtcgtagcgatcaatataacagacaaaatcgaaacagtgataaagcccttcctatactgcggcgcatcaacctgctgccagacgacctggggcaaccaggcttggaagacgtaggccatttcattcatgctgccgattactagagagcgctcttcgttgtcggaggagcagatttcgtgggcccatctattctcacttagccaacctctgggggaaacatggggaggtttatcaaggtagatgaagattaatggtgagagtaggggagaatgaagacatacgccatgcaaagcccgcttagaccatatcctgcaccggcgaggatataacaggtccatttccagccgtctggtatatcccagacggcgagggagacgtagcatattatatttattatctggacttgttagttgggttaggttcggaatggtaggaggctaatgtggcggcttaccgcgccgaagatgatgggtggccaacgttttccgttgaggaatgtgtccgaggaccctattacatatcagcctctggtcaatggcagcttggggagaggtatgtacaggcataggcaagcgtagtcacgacctggactgcagccgtggtcgttgggtaggcgttgatctggccgacggagtatttggggtctgttgagtgtttgagccatctgtatttgttagccatgctccactagctgactgggtaggtagtctactcactgttggaacacaggctgagatccagcagcgccgttgttgaatgttctgctccggttagtcaatctagaccaggctatttggtaacgatagactcacatatacaggacagtaagaagataaatatgccaagacgtaaagatcttcttcaacttgcttctcgtatacggctccctattcttgcgtccttccagctgcattcgcttttgcgaaagtgccacttcctaaactctacgttagcagatacaccccgaaaatatccagcaaaactcacatccttagtcaaataccacggattcgaaatctcaggcacatcaggcagaataacaaacccgctcaacgcgacgggcagcgaaatgataccatccacaataaacagcctagcacctcttagccaatgccacaatgccattcgcacatggacagatggaaaccataccactgccatcctcgaaacccaccccgtccctcaaggttatacacggcagccatcaaatatcccgaaaacatactcgcgataccactgctcgtatggaagatacacgatcgtttcgcgagttcgtctttccggtaccacgagccgatgatatattgcattccgggatagaaggtactttccgcgaggccttgtttgtcagggtatatgtataaatgggtggattatgcatgttcctaccgataaagaacctgaggacgtagaactgagtggacgtgtgacatcgcgacatagcgaaggttaacacagtccagagtaactgcattcgttagcaatgccgaacactcccatagaccggagacatacctccatcgccggaatccaatatctaggtctaatcctcgtaagaaggatattactcggaatctccccaatcacatagccgaccgtccagcaagcctgcatataattcagctcgttgccgtacatgccgagatcttctttcctgagtatgtgtcaattgaccgtcccacgattggaggtggaagatacttacatcccagaaacaaaggcattgttaatattgatctgatccaggtacttgatgaaatatcctatatcaccgtcaatcttcacccgatcataaaataaaacaaaagaaagcccacccagagacgcgaacgtcaaaatcgccgaatccaatttaaacatcaacctccgctcctcaggcgacttatcgaatgtatcccagatataactgacccatttgcgcttcggggctttctgcacgatgtcgcttgctgaatcgacggcccgttcttctgcgatggctgttgaaggagccatgttgtctgtcttggataaaggaagatatcttcctgcggtggtagggctccagcagtgtttgactatactgggagagaagagaatgggagcagggctcaacaatcattatatccgagcagctacgctaaaaatcccccaacatgttgttcgactaatgtgtattattttcaagaaaggatagataagagtggctccacagatctagtgtcagggacttggctactggataagagtcccaattgctcataatagtggtgtttgcgcaattcttgcatcggcagttggcgcggatatattgaattgtcataacagcttagtgcggggaaagtttacattagttctccgagtcatgttgggggatgtctagccaataaagacagtatagagataatccattcgacagtttctatagggaagctgtgacgtgactggagctaaagattcgttgttgtcgctgagctcgtcatcgcgaggatggatgatgtgccgagccctatcaatggcgggatcctcacaaacttaacgtttgacgagcttggccaatacttgtactaactagatcatttaaatctctgtaagcgaaggttactagaggttcatcgtaaagccgacagaatattattcctacttcgagatagtgtccgatctagagtgggttcaagcaagttaactacacactgccaacaccggaagctcgccgacaccactgtccctccgacctgtgctctgccaaagcccttcaatcctttttctatgttcttccttggcttcaagccactgagtggaatgtccttccagcggaccgagcccgtatgtagccctatcctcattcacccattgtaatatatccctcacgtaaaactcttccttatctttcaacgagtgaaacttcttcccactgccaacttccttgatcttggccaagtactccagtctcataacatccgccgggggtatctgggcaattccggcaaagacctgcgttgccacgatcgcctggaattcgaacagagtaaatgtggctgtgtagtagggaaccccgataaaggctagtgtgggatctggaatgtagaatatatctttatgcaggttatgcacttgagtcccgtcggtgaccagaatcttctcatcagcaagttcagcaggcgtgtggtcgctgtgataatctcgcaggaaaggtagcgtgatgtgataaccagtgcagatgataaccctatcgattccgcatagtttctgccccgacttcagatgtatggttaaaggtaaaggctcgtcgtcggaaactgtgtcctgggacctgtcgatctcaaagtgcgatacttcgccaatcctcaccccgttatcagggagcaagctcgcgggaagatcgaagtcgccgttccttgtgctttggtagacagttttggcgacgggaccaatttccttcgcaatatctgcggatgatactccaccgccaatgaggaggacattctagaattggtcagtatgtgactattcataaaagggagcgatcggaccttgttctcaaagccttgcgactttcgaaaccccttcgaatgcataattcgagacgcccaatgagtcttcgcttccgacaagccaggtatatctggaatgcgaggcgcatgataatgccctgatgcgacaattatcgcatcaaatacctgccgaaccattcgtcaataccaacaccatatgactctgtagagcgatgtcgcttaccgaaatttcttccaattcgaccaccatgtccgactggtcgttttcgccaactgtcgaccagaaaacctcccatttatcaccacgtttgcgaaggtctttgactcgcgctccgtagattgtgacatcatcaactcgtgctttccgagatgtatcttgaatatactcttttattacatcgtggctgacaaagtctggagtcccttctggccacgcattaagcttcacccgtatcaaaggcgtgggaacgttattcctcaaactctcatagcaagggctacactgtcagcaggaagcagaataccccataacagaagtgcttacccaggcggcgcatgttcgagcacgaatctctccttctggtgtcgatctttcgccggttgatctgtttccgacggcttcgtggcaggatactgcggctcgatcggctgccgttcatcgtacagcctgtcttcggttaatttctgagccataccgaagatgccacatgatacataccacactcctcctgcaaccttatttctctcgaagacagtgacatcaaatccggccgccagcaggtgtcccgcggaaacaacaccactgatcccggcaccaatgaccgccaccttatggatttgggtgcgagtcataatgttactgttgtgtatttgcttgtctgtcgagacaatttccatgtgtgaattgggacacctttatgattgtgatggtggtaaggacactagtaccgtcgcagctcacgttatgccaggctagagtggtgtcatggctcaagcctcggtagtaatcaacgcaccaccacaaccagcatgttgttcaagcttaatcttctcggaagggtgtgccgtctagagtgttaatggaatgtggtggaccaatattcgatcaaaggacgtagtgcggaccgattggaaatcagacaatttgagtcgccatcacatccttgtatggtgatatcggaggggctgcgggtgactgagttcaagctccagagtggacagagataagacactctagaagcaggggatttgcggagagatgaggggttgcaactgtgggaatatgtacgggatccttcacatatgtgacgaatgagatgtagaaggcgtaatggttaatggcgatgatgtgatcccgtcgccgcgggtgacttaatcaagattatcaatcaagtgcccatagaacgaatataatacaagtattatgttgattcttgtccaagactgtcgcgaaattgatagatcgcttaaaaagaatagattaaatatccattgcactatggcaccagctcctatcgatccgcggatcgttgacgtcgccgagccccagaaggacacacttgcccttccagcagccagccgcgaacggcttgtaaaagcggaaattgatctttccaatgggtatccatatcggccttcccgacctctgtactcggacgatgtttacaacatccgaaactatgatcgcccacatgtagatccgggcactcgtgccgaccccgagaagaaggcgttgttgtccgcagcaaaagaagtgattcacctaaccaggcacatcggaaccgagatcgtgggactgcagcttaaagacttgactgaccaacagaaggatgagctgggcctactgattgcagaacgaagtgttgtcttcttccgggatcaggacctctcgccccagcaacagaaggcccttggtgaatactttggagaggtcgaagtccatgttcgttttcacctttcgtgtcacatactcgagtcccttttctaatatatcatcgtagcctcaagtaccccaggtaccgggtctaccgggcgtctcggttttatggcccgctctccaagccacagaacgagcagctagttatcgtcgaccgggtggagcttctcgttggcacactgacctagttcatgagcgccaaccggcaggggtgacacatcttcacaatgacgccgtcccgaccatcggcggagatactctctgggccagcgggtatgctgcatacgagaagttgtccccggagttccgtaaaatcatcgatggaagaacagccatctatcgatctgcacatccgtatctagaccgcaaggaccccgaagccggtccgaaatatattgaacgagagcacccgattgtccgagtccatccggcgacgggttggaaggcgctgtgggtaaaccgtgcgatgactgatcggattgtcggactcgacaaggcggagagtgatgttattctagggtacctattcgatgtatacgaaaagaatattgacattcaggtgcgcttcaagtggacacctcggactagtgctttgtgggataacaggttagtgaacgtcctttggtttaccatcttccttctatggggaactaaccctgggcagaattaccattcacaatgccagttgggattacgaaggctcggagcccagacatggcactcgagtcacggccctcgcggagaagcctttcttcgaccccaacgccccgacccgaagacaggctttgggcttgctgggccccgatgagatccaagagttgggaaaacagtagttttgctgaagcgaataatgaaagttttattatgattatgagggtggacctctagtatggatactcagaaacctcagattgcggagacagaacccaatagtgaagaatatgaaagatggtttgatcgattgtgttccagagagtcttcaggcgcataagtaatttctgggaggtaaacaagacgaggcgatggtcgtcaatgctttacaaatgcatgtcacgcgaccgtaacgtgacgcagaaacagctggagggtggggcaggtattctatctattagtgtagatcctgtatgcatatttagagaaatcactgggataagaattatctggagaggattcttccctcccttgcataggaatgtgagtaattcagatattgctaccgtttagttaagccctattcaacgattattaagagctttggcaagtaaagtatacgccacttgtataattgacatttttgggtaaaagggagacgggtaaaaaaagggaaagccatataaagcgcgagtatccttaaagcagatcattacatatccctcaattctttgtcggtaatttcccacgcctgtggcgggaaggtctcctttgagccaataatttccgtcgttgtctttaccagctataaacaagctatttgccctccccgagtttgggtgtatataaattaggaatgtcaccatactgcctggaggattgctcctcgactttcttttgtcaccttggcttaggagcgctgggccgaagtttgcagctttgattaatcccatcttagtcaggtcattgacaaagaggatagaagcgttcggatctccatagaagaggctcgggcttccagcagacttgatatcctggcggacgatcttcagtagaccgagggtctgctgctccgtgccctgttcgacaagatgacgttcgatgactgagagcattaggtccaataggtcccctggcaagctgagcggagaggaatgcatacgctgcaagtgccatattctggaggtagacacctcctgatccagtgagcagcggaagtcggaacctagtattcacgatgctcactaaagttatcggacatggcttcgacatagatgatgctaccgttgagatgtgcagggcattaagagggaacgactgggaggagtcggtagaacgacggtactctccgagccagctattgtctccgagtatatgcgagtgaaaaggacacctgaattattctctcggccgacgagatcgatagagacaccttactgtttccacagataatcaaaaagaaccattgagacaaccccgaaaggtcaacaacgggggcaatggcgtcatgttgccgggtgtggacaacgttgctgaaaccctgaaggaactgcaagcgaaatagggtcttgcatatagtttattttactttatcttacctaggacgaggtagggtgcaaaaaggtcgttcggagcccagttgggggggtgggggggcggcgggggggtgcccgtatatcaattcctcttttaaggataggactaagtactacctagtcccactaacggtctttaagcgagctactccacaaccttttcaaaccctatttcggaaagaaggttttactcgcttatcgtagatcgaattgacccacccatcgccgtacgttggggaccacatgcctgaagaagcttaacaagcagactattggactatctaagttttaagttttaaccgattgaaaatgcacaattctcgatgacgtctctgctgcgtacctcattcgctcaaggcgtatgctacaattgcttgtgtgaatagtccctccagtgttacagtctctggggatgttgatgccatttccgagctagaggctgttctgaatgagaaatcgatctttcaccggcatctcaagctcgacgtggcttaccattccaatcatatgaagaatgtggttgaagcttatttcaaggccatcaaaaccatcaaacctgctactactgcaatagctatctttttctcgtcagttactggtgggatcgctgcgccggccgatctgggtcctgcctactgggtgcagaacctgacctctaccgtcttattcactaatgcgcttggtaagatgtgtgccgacggcgagtcgcggccaaacatgctcattgagctggggccgcactctgccctaaagggccctatccgggacactctgaagggtattggccctcccaccgctaagattgcctacgctcgcacggtcgttcgcaattcagagccttcgcactctcttctgaatgctgcaggagctgcgtatgtgcgcggcgcggtcctcgatatgactgagatcaacttccccaagagcaaggccaagaaccgctccttcttgcgtgacttgcctcgccaccctggcagcatggcacccgttattggcatcaatcctgcatcgccgataaacactgtcacagggacggcaaacgcgacgatattctggggaccatggctctgttctcgaataacttggagcctacatggcgcaacatagtccgccttgacgatgtgccctggcttcgggagcagaggatccaaggtatgagcgtgtatccaatggctggctacttggctatggccatagaagcagcagaaagacgcgcgcagcagcacgaggcgatattctcccgattcgagttccgtgagttgaaagtgggtgcagccctcgtgttgaccgacgatgtcgacacagaggcagtcatcaccctccggccatacactgagggtacccgtggcaattctgatatctgggatgagtttcgtatttgctcatggaacaccaagcgtgcctggaccgagcactgcacgggacacgttcgagtccgcatcaatgggaagcagcagaccttagtctccaacgtcgccgagaccgggctaaagcacatgagtatccagacgaagaaggtgatgacagcggctacctataggatagacacacagaacatgtaccgggttctttctggggtcggagccggctacggaccatgctttcagggcctagagaactacttctctaacccgcaccactcacgtgcagacctgtatctccgtgacacgaaaaaggtcatgtataaggagtatgaagctccccttagtatccaccccgtctttctggatgcgctgctgcaccttgcctggcccattctagcagaggtcgcatggagctcgaggctctttacatgcctaccatgatcaggagcctgattatcagcgccaacctttctactatcccgggggactttgttaaagcgtggtgtgttggtggccccagtctgtctactccccagcccaccaagtttgacttatgggcgacgtcccaagactcgactgaggtcctgattaacatggagggtctaattttgactcccatgaaggatcccaatgcagacagtggtggagacgtcgccgaactgtgctacaaaatcgaatggcaacctctgcacgacgataaggctattgctgaggaagaacgccaagagcctatcgattatataaacgtcacgctatggagcccaatgtccttaccaatggccatactaccaatggaaaatggaaagctccccgatggatgcgtcgtcaatggcgggcttatcaaccgccgtgctagcgatcacataggccaggggggggggggggggggggagggcacgttaatggcaatggaatcgtcgatagtgtcaatggcatccacaccaaagacctgttgatcatgcagtatggcacgcccgacggcagtgctaaatggctgagcgaggccatctccaccgagactaccaattggaaaccatcaatttaccctttgggggaaatctactcctgtagcaagcatgttgtcgtcctccagacgggcatcacgtctctgcgagaccttacagtcgacgtcttcgataaggccaagaggaccctactcaatgcttcccacctgctctgggtttaccatctggacagccctgatgcccagatgatcgttggtcttacccgcagtctgcgttctgagggctttggcaggatcgccacattaggactcgaagccaaggatattgagaagccaacccctgctatcttagctgctatggacgcactgtggccggtagatggcgagaggtcctgtaaagaacttgatttccgcgcttgcggctccgaccttgtcgttcctcgtgtcacgaacgataccgttgccaatgcatttgttcataaagagacccatgagaagaccatctcagttcagccattttaccagtcaggccgccgtttcaagcttgagattgccagcccgggttcgctcgatacgctgtactttgcagatgataatgttggtatgctgggcgacgacgagatcgagattgaagtcaaggcgactggtctcaatttcaaagatatcgttgtcgcaatgtgccagctcgctcagccatggctaggtattgagtgcagtggtgtaatctcctctgtcggcaagaacgtctctagtttcacggtcggccaacgagttgtggccttgcccgaaggtgcattttctacctacgcactatcccgggctgcaagtgcggcccctatacccgagaacatttgagtgatcggacaatatatcaattgttaggcaccgtgcatataaagtttggttctggcaggaatagtcagtagtagtggatcaagtactgcaggattcaaggtcataaacacgtggacgcttacccatcagcaccttccggtcgacctttccagtttcgaaactatatgatccgtgacagaaaaaccgcaaatagacctagtaataggtcacacaaacgacatccacatctgaagtattcttatcgttcattcgtccaaaaattttacattcagccagaaatatattattaaaagactgtactcctaatcttccagggaaagccaatccccgtggttgtggttcaattaaatacaatatctatttccgtgttattctccagccacatttcatcaagggtaaacccactttcccgccagtaccgttcaaccacgacaatccctaacagcgttcttagcttaaagtttgaagggagccatccatggctatggaaataactcagtctgggtcgaatttcctcgcaaaggataggatgggtccagtgcaggtgtccaccaacttgagctggaggtatggacacagacgccacgagaagaacacggagatagataccaaggcttggattctgtgatatgaggcctgggaatcaagtatatcaagctcgatcgaggtagtacaattgagatgagaagaggggggcgttgaaagacacggaagagagggcggatgcagcatcttataagcgctcgacgagtaggcgaaagggaatagggagctgcgtttggatgccgagaggagccattttcggtatcatttcgggcgctagtagaagcgaggggaagaatcgttgaagttgaacgacaacaataaggtgagaagaggatgactaacagtcctcgctggttgcagaaaagagggcgttacagagcagcgggcggtcaaggttacggatggaaagaggctgtttctggcgccagggcctgtcattttcggcgtcgatttcacaggtccctatattctagttgtaataggtggacatcgcggagaaactagccgtccaacgctgacgaagcgggggctactccaagtctcaaatgcacgcgttgcgtcggtaataatcgaatttgacttaggcaggtgactcaatacagcctgtcggtctccgttgtctcagtccgacgacctacgaggttccgggaggtcatcatccacaggcgttaacgtgcgaaccgttcgcagagcaagatccgtttgtacttccggtttcatgccatacgtgatttccgctcctaatagccccattgctccggcgacccggtccaaccaggtcaatgcgcgctggtcatcattaccgaccgaagcttgtgggccgtttccgaggtcgcaggacaaatcaaaggagaggagcggtggactctccgcatctccagaactttctgggcttgacacgggtgttagcgctccatcacggattatcaaggtttgttccacggcaggtgtaggaacggtaattcgatgtaatatttgttcgaggatacgaacggcgtcaactccggcacgaaggagaagggacgggcttgtttccgggaagagttggggctccggtccgacgaagcggagagtgatgccctgctttcgctggttatgtgcactgagtaaggttcgcatttctttgcttagccttcgcagtcgatcacatgttgtacggatacgataagccagagatctggcctctggtgaggtcaccgaaacgattgcacgggcttccttgatatagccggggcatttcacaagctccatgaagatggtctcatagacgtcgatataaaaagcccactcgtcttgcttctgggaatcctcggtccgtaaggatgatgccaagttttgccatggctcctcatctaagaaacatgattcacccttttgaagggcagcaccaatcagaaacggtctgaaggcaaagtggcaaacacgcccagggcccgtcaaatgagctctcatgccacgcgtcttcatcagcatcttcactgcgttggcgtggaagatccaagcatcatcggaggtgcgtacgttcatctcgtagaaggccagcagtatgacggccattaacagggcgtccgacccgatatcatccgatgtcagggcatattggataccgctcaaggcttctgtgtattttgctcgactggcatattgtaggttggggtcttttgtcagatgtgcaagccaggctagggagaggcacataacggtagcatcgtagtaaggcttggaaccgaactttttgataacgttgtccgggaaggtaaaaccgggtccaaaccgaaattcattatggtaatacatggtcggaaacgaggcacagacaaattctttgaaaaggcgtggctgctgacccaagaaagacttgaatgccagggacggacaaatctgctcgtcgagggaggcatttgtaaagcaacgcatctgcagctgggcttttacgggaagcgagtccgaaattggactcgatccctcgtcgctcccatccgtgtctggggaggtaatgagatacagtccatgcagacggggtccctcatcctggaacttcagagagcgcttgtagccgggacatacggcgccatacttgcgacactgcgagcaatgcggtcggctttgatcacactaatcactcccatcgaagtcaacgattgattcaaaaagaaaatattaaactataaaaggaagatatctactataagagtaaaggggaggggaagggggtgtgataaccgaccctgatacgtctcttgcgacagagcgaacagcctttgctgcgaggaacgccaaccattctgaatgaaaattagatttgaggagcagtggcgacactatcacattctactgcgcctgcagtgaccgagaaagccagcatatgcgagtagcacggagattggcaataagctcggagaaagggacggaagcatggacatgactttttagcccacagagaaagaatgaaggatcaggcaatatttccccccgcaaaggagaaaagaaatggtctatgggtctgggggcgtctgcttttccacccctggcagaatcccccctcaccgcccggaacgctggccttgacaatctccacagcgggatccacggttcaattcccgtgacaggcacgcaaactgagcaaactctcctctcttttccaacggtgtttttctttttcaacctctagatcggggaaccctgacccaccggcaggaaaacgatgtgaggcgcctgtatattccgatcggactatttcttcagtttcaaaatgatccgccctagaccagcacccgaagcaaatgagtgaaacattaaatttacttcacccaattttcgggaaaacatttccgcccagggaagacagtacagtgcaaagaatgcgcataccatacttggtacacgtacgtgcctggcagtacctacgtactctactaccaccaaatgagaagaggctaggaaaataacacgcaaatcagacagatagtcctgacggaaaggacactcgctgagtccaatctacagagcaactatcgtcctatcgttccaataatggaatcccatccgcgttagtcccgcgtagatcaatcaatatctgccaaattagccaacgttccaaaggggctcgggccatccccgtgcgcactgatccattcagaacttagcgaatcaaatcccctcggcttctacgtcaatccagttagcggcgccaccgtattcagccttgtcaattaagttgccttcaaatgaaggttgcatccaggggtaactgcaatgatatgaagatacgcccgagaatagctgccagaactaacaatgcagaaataccaccatcggccctcgaactctgaagttacaactacctacaatctgacggctatgactgagcaccaaccaccgtcccttgatcggtcgtctggatttccgttcgccgcggtcggacaacaatgccgttgaaccatggtcgaaatcgctactccccgctttaatgatatccaccttgcacgcttctctagcaggcgctattgggggaggattactccgtacccctgataaaagtcactcgttgacacgaatgccattctcaagccggcattgaccacattgactacctatgcgggcgacaatagttgggtggcaccgaggacgtgtgaagagtcgtggcgggattcccggccaccgaattccacacagagcaaaacacagagcagctcgcatctcgcaggacgccatctggactatgaggattgaaggtcacagagaagttgtaaccgggactacccagtcgttcagcgacacgcaggacttcgtatcacgccaaattcatccacatctaccggttcggcgacctaccaccactgatccttctctatacctaaaagctcggcatggattatggaagatctgttgtaggttgatgcaagagtaggtcacacgagtcatgcctgcggcttgaacaaaatttccccggagagtctcaacttcagatggcttggaacctagaagtcttagtacaatattataatcaacgtatatctcgaagtaaatggaaatgtgatgatagatcaactaaattttaaatatataatgagtttcaactaatcgtggtaagcataagataaatttggtacgggatttcgagaaggcaaaagtgtgctgttctgaggtagaacattatatgtatttgggcgttatagaccacccgaaaatagccatgtcggttaagttcgcacttgcgatcgataaacattcagtatggactattctgatgcatcgtctcctgtgtactatttaatttcgagatcaatgaccgccatagaaaatcatactactccggacgcaacgccgacgagccttaccgtcagaaattgacggctgttggtaaccccaggaagctagaactagcggggatgtaccccggatgataagattctcgctctccctaattcataccatacgtctatttatttattaccacagaaataaactacaaggtttacaaagtctcggaggccggtcactacggcgctttggcattgcaaagcagccattatgcgccacggggtttccgatccctaattaagaaggaatcccgagggttttggctcccagacgcgtcactgtgaatgcagcatagcaacaaccgcatttttatcagttcagtcggccgctactgggcaagaagatgttccaggacaccccagttaacagccagtgaaagcttgacctagcagccatacatttgcgctgttggtgccgcagcagtaattctcggctgagagagacgaagttgtcgtcacagccaatcaatctgtgattgttgccagggcggcattctccataattggcgtaaggtgcaacaagcgtagggggtcgaaattacctttgattgtatcccgttcaattcacgctagtcctatgtctgttatgtagttatctcggcgcgacgaagaactggtcatttccgcctcagtatatatagccaatggaaaacctcaggggcatgcgcaaatgaggaagtttgaccctggggcgccttgagcggggtacgggaaacgagatcccaatgattcgctagccgtggaaggttatcaaatcgcatagttgagtaggaaagggaaaaccacatcgtcccttcgatggtcaacgggacgagatgtagcgccaacagctcgactggggatagagtcgtttgtccttgggtattcgcaacgtcgcgcaccacggggcaggtgtcttgtgagatggaggtgggcgagagcgtcgtggatggggaggttgcgatggcgtcgctcgtgcttttatcgatgattatatcaaaaggcgccagcggggccaagctcgacatatcgttccatgatcgaagatcagcacacagccagtgcattgcatgcgacgggttttgtttgctctcgatttcttggcccaggcggacggcttcggccgaaaaatcaacattctatgacagttgcgcgtcagcagagattcagttccaacaagagtgagcaaactcaccacgatgccagagcctttccagtcgcggtccacgaatgcctcgcgaagcttcgtccctagtttcgagatcccgggtcccagatgcaacacgcgaggggaacgttcttggacagatgatcggttgtctaaatgtgacagaacagcctggacgagattctccccaggattcaaccattcgcccacatcttggccggtcgcaaatttcgtatcccagaaaatcgggtcgtcgtagtccggagtccctgcgattttggtatgcgttcttgcattcgacatattgggcggtggaaaagcggaaaatcgcttcgggacttgagataagaccatggtcacgtgttgattatgtgggtcttgaatatcccgtgtgggagataaacaacaagcggaagataaaggcttctcgaatgcatgtcccttcaacgctggaattactgggaccatgctctattttataatcgagcttttggcccacaccacttagcatagtgtctactaactctcgcactttcaaggctgcatagctgtagacatacaccagactgccaaatccatatgcatggacaacattaccttcggcctcaatacggtaacctcctttcctccctggccgaaatgcaacaatgtcttttgttgagcccttggtgagagccttggaacgtcgcaagctcatcgaagtcagtttccaggtacattgtttgtccacggacgggcagcacatccttgtcacctgcgagctgtgcggcacctagtcccgatgcatgcacaggcatgtcacgcttcacaatgtgcttagcttcctcaatcgaatgaacctgcttccgaataaagcggcgcgttcgggtgaggtaggcataccaaggacttgcccaatcttgattttgatctcccggaaggtcagaggcaatgatggtcactttatattgcgcatgggtaaggacaagagcggagagaagactaataacactagaaccgatgattgtcacatccattttgatagttgaattaccctgagatgacagattgagcgagcgtcctacgagagtactaatagtgtggataaagagtgggtacaatagtgtatattcagtttctgctatgtgtgtaatacggaacaccgccctcccaatgggcgatttctaaaaaaaagatataatctactgtgctataaaggcaattagggagttcgcaaagcctcggtcaacggagttgaggggacggtttggtttcggaaccacttgcacatttccttgtctacttcgcagtcttccaacctatcaagaccttccaagccttatctatctttgatagtaacctggctcttgtatatgcacaactaacttctctgtcaaccgtgtgagtgtgtataacataatgcgcccttatccagtgcgcctccatgcaagcagtcataatacacacagttgacagtgtgtgaagactgtaggataagcttctgatagaatagagaagtgatcaagcttgagcaaacagcttcaccttggcgtggatgtggttctatatactagttattaatcttccaatgcctttggctgtctcaaggtaacgaggcaagctgttccggaggggacagttggtagtcggaacatgtagctctccaggatgaagagatagctcgtatcattcgagaccctcgcagtatcatgatattcgcaaactagtagagtggagtcgtctggggatatttatatcttgcttcaccatgatgaactggatctatggcgccccttctctgacccttaccatctcgcacactctcaacatcatgttacagaaatccaagatagaatccgattcggcgcaaattgatcccatacatccagctcatggcatagtcggaatgattgttgagactgatgctgtcttcggaaatgtcacggaagacgggcctaattaccgtaatgtatgtagaagatcgtgattatttcccccaccggatgaggccatacaaccgtgctaacacttccactgaaggttggctggataggcacaactgccttgatgatgaaaacccagattggacttggggttctttctatgcccctcgtctttggtaccttgggtcttattccggggaatattctcctgttgactatcgccggtattacgacttggtcaaattatatgatcggagtcttcaagctccgtcatcccgaagtatatggcattgacgatgtgggacggatgttctttggccaaatcggctgcgagctcttcggtgctgcatatgcactctgtgggtgtttgtttttttagatagtggttatggtgctaactccgctctagtctatactgtagccgctggatcggccatgctgagtatctcgacggccctcaacgcactttcctctcatgctgtctgtactgcggcttttgtggctgttgcagctgtgattgggtttgctttcggcagtattcgaacccttgaccgcattggagttctggcttggattggtgcaatttcaatcatcattgccggcaagtatctagtatgacttgggtgcaagtaaatcctaatcatttgccggctagtatttattgtgactatcgcggtcggtctccaggaccgtccttcagcagcaccttcaactggtatatggaagtccgactataagattgtcaataatccaagtttcaccgacgccgtctcagcaatttctacacttgtctttacctatgctggtacgccggccttttttaatattgctgccgaaatgcgtcaaccactcctctacactcgagcacttgcagtttgccagaccactgtgaccatggtatacgttatagtcggcaccatcatatactattactgcgggtcttatgtcgcctcaccagctcttgggtccgctggcgtgaccataaaaaaagtggcatacggcatttcgttaccgggccttatagtctcttgcgttctctttgtccatgtaagatatcaagcagggctttcttgcgaagagctactaacttagtgcgtctagcttccggcgaagcatactttcgtccgaatattacgagggtccaatcacctcacagccaatagtgttattcactgggttacatggctcggttcaacgtctagcgtcgccttgatcgcgtacattgtcgccagtgcaattcccgtattttctggtcttgtctccttgatcggtgctttactagggaccttcttgactttccatccatatgctggtatgtggttatacgacaattgtaagaaccgtgaacgaactctcagctggtattcgatggttggatggtgtattttcatctttgtggctggtacctttttgacaatcgtgggaacgtatggctccattgtgagcattgttgattcttacactcagtcaggagggaccccggcatggtcttgcgctgacaattcgaactccacctgagaccaactatgtgtatgttcattgttttgctgtcgctgcccttttatctattatcatactccacatatcagggcacagatcatgctgtagtgctcacttgattatctcttctacagagtgtaggcccgcaaatggagtgaaaagcaaatgtagctgtataaagccccagtgtaggcctcacttctaagctgactccacctgtttctctctatagtcattaggttcgtgattgggtatacgattattacattcttgtcagaaattccgattatactacaactctgaaaatgttcggaatcatagagtacaaaagtcatatctaaagcctttagtataacgatgtgtactaaagccataagcccttcatttgtcactcagggggaagggaaacgcataagtaggaagctcggcgtttgcaatctccgaacaaataattcctgtgataacattttcttaaaacaccggttgtacgagaaatgatacacctggaggcgttttgtcgaattaaaatgagcattaatactataccattatatcattatcagcgcttatctccggaacgacatgcattttgtggtattgatatcgtcgtgcagagaaagcggatccggtcacctgatcatttatcactatctgctttctcattggggtagagactccggtaaaggtatcaattaacctcggggcaacctcccgtgtcattacttcgtattgaaatcatgttggccaggtctagagctcgtcaccttgtatgcactggtactcctaccactatccctattccggtgattaaaattctgtggggtcgaaacttctacttttggaactgtctggactagtatcaccttgacctgacttcggatgccattttgattgatcatttcaatgcgaatttcccttgtgattcgggttatgaattcctgaagttcgagcacgactgacgtccgacggcgggaagagtgtcctctcactctaaaatagcgagggactcaactagcaaacaaggagtgttcttacctgtttgacattgtgcgtctcatcgcgtaggattcaaggaaaatgaaaagaaattgaaagactagggacacagttgaatggagcccgtatcgaaatgcaatggaaacacaatcgaaacacatttagcaccttataccattctctttcttcctacgttgcaatggcagtattctcggaaagaagctttcagccccaccataatttgatgaactacgatctgcgtacagcccgcgagaccatcggttcgtgtgaaagattgcgctgatctctataggtctattttacatatcatttcctttacgaatttgccagctgtacatagtataccaaatactagagggtcagctttgccacagtggttctaatagatccactcacgatctgtaagcgaaatcgctgcccagagattgggcccagacacaatttttgggcagaacctcagctgagtacatctttatctgcttgactgatatacctttatagattagcttagaaagggcattttggagcagaaaaacagctcggtaataaaactcaccctttctatagattacttgccttggggggccaccatcccacgtttgagggctctcgtgcttttaaaacatcacatcaaattagtgaatgaagtagtctagcaaaattagagagacgcacggatatctatcctactaacctaactaggaaggttgggctgagccaggctgcacgcatatctgtagcctacatgtttagtgaatagctctaatgggtgaatgacagcaagtcctctgcgatcgtacatataacggattatatagctctctcttttctctaatctgtcttatatcaattagcactccaaatcaatgagaagacttccaggttcagctccgtcttatttaacttacatattagccatatgatccactagaccttcaagccgggccatgtcgttatttcttgtgatagtggtggtcttgcttcttttcctctcctctcctctgcaccgtctagtccacataggactaaagaaaccagtatcccccaatatcgacccagaaacataccgtcgcataatagagggaaaaggactttaccaggaagtacataatcagcttaatgcacgtcagtccagagccatcccaaacaaacgactgcgcgcggtatttgggatcgaaaacgccttgacgaccgacaatgaaatccacgcgaaacgcttccttagacaagtcaaagggttgattaacctgtcccccacatcctgggagtccttatcgggcctcgtgcgcagcgccgcacggcgtagtattgacggcgcaatggcaaacagcccggacaaaccacgcgtcatgctcacaaacctggtacaagtgctagtcttgcgggtggtcttaagtgttctattccggatggaaaccgaggcccttgaggtcccagaccacgatctactccgtctcgcggaagcgattaacgatgcttggacttcatccaaagacaagacgcacctcgtatcctttcaagacaatatttctctccagaattccttgaagacagtgttccctcatttgaactgtctggatccgcaaggaaacccactgaatctggtcatcccaggcttcgagacgatgtggcggattgtcctgcgccttttcatcgagataagctacacttcaggactctaccaccccgaatggcgggggataatgactaccttcgcaattgccccaaccaaagacgagttcgagcgacggaacggcaagcaaaacctctcagcagagatgctagtcaacgaggcactgcgtctctatccacccacgaaacgtgtgtatcgtgcatttctcccagtggggtcagatacagtcgaagtcctgaatgcagacattgagaaggctcaaaccgcaactcatatctggggctccgatgcagaagtatttgccccaggacgttggggtgccttgacgccgcagcagaaactcgctttttttccattcggtagtaagccttttgtatgtccggcgcaggctgcgtttgggcctagggctattgccttggttgtgggtgcgttgctggtcgaattgggaggagagtggtcgctttgtgtgggtgctgagtgtacggaagccttggtgcctggggtaaggttgagtaaccaaagaacggagtatcgtgacttgtgtcttgctcgggctggacctgtttgagatgcgtttcatactgacgggaggctgtagaaggttgaagatagatattgggctatcgggtgttagtcaggggtacttgtgcgttgtaatggttattatcgacggtctttaacggtaaatgtgttaatctgatcatgtgttttctgttggatttgaatatctatggaagggttgaaggcaggtctttttgatattcagccatatttacctttcttgttgtacatattttcagttccaaagtctcgaatgattttaagtatttattgaatgcatggcggccagtgcataatgtagcgtgagtaaaattcttatttctgacagtagaatcgatcatcgatggtatgtaatcgtacttttcctttccccttgaacgtttagtaaccagcttatccaaaggctgactatgactagctgggactggcaaaactcacctcacatctaccgtcatacacgattatcgggtcatgattgagaattccatgaaaaataaaagggctgccttcttccactacaatatgaacgaagtggaccgatataagtcataatccattctccggagggaattagctttcgagagccgtgagcaatctagaggctatgagaactgctcttcagaatattataagaaggcttccgataatgcgtcagagcttagctgtaacgtatgtgaggagcaacttctaattctatataaggagagtaagttggttttggatgtcttgaacgaacgtgatccacattcacaaaataagatattcgaagttttaaacaatctaatattgacgtccaagagttattgaagcttgtcgtcttaggtcgtcctgactagagtattgtatggtaattgaatagctcccctaacatcgatttcggagtggatgcagtgagggcgatattaggaggtttcccgaggggtagctagaaagtcttaccaggaagaataaggtaatccggtcttgggtgataatgttgtcttttagtaggcgtctttgcaggtcaacgttaaagtgaatagtcattttaaagatactccatctttcatgatggggatatataacaattcaaaatgttcagttgtatcaatatcctctcattcaagaatgtgtgacatattcattagtagccgttcgagttgttggtgagctctgaatattaaagtaaaggggtaaaacaccatgcctagatacatggtggtgagataagcatgatgtgagcgactcaaaataggttggttgcttggcataacacaagacacggtcgaggagacagaagttgctagcacttctgcagtattgagatcctcctgggatagatacccctcttgatcaagtaaatttatgtcagttctaatatcggctagctattaacctatattggatatttttttcgtgaaccctttatactcagtgagctcaacaagtaaagtgccttttgagggaagaaatgtaaaacaaggcgtatcaactgcatatcctacctattttcgatgcgataaataagtcctgcggttttcttaagtagtttttacattctatccaacatagaagctcttaactgttgctgttgctgtatggatatgatctttgagattggaggcatgaaacaggagtgacctccccacaaggtagacagacacaaaggcttacagggataaaccaataaggcctacttggccagtgtggcgccattttgtgcgcattagtagcgtgtacgaaggtcgtcaatacgcagtcttacagcgacagcctccataacctatagaaattaccctctttgggacgatcagaaaatcacaagttataaccagttttatttagttcttgatctaatacctaacaaaaaaaatggaaatctctttgatatgaacagaccaatataaacacagccacacagcctttcaatcgccaaaagctatgagaagaaaccgaagttagaggcggaatcgtctttgtcatctccagcaaacgtaaacaatgaattgatgcggatgataggctgagagaatcatgcatcgcgtggatggcctaaaatggaatctccgcgctagggctgtggacgtcatatgacaactactggcaaaggcgacgtgccctaatggcccgaacgaatgtggaaggacaatgggttatccaaaccttctgggcactggtgatatcagcttgcatctgtggctggtctagagttacatgatctcctagcatccatgaagcgcatacacgactagtgtctgggatcgaagttaggggtcatctcgattaagctgatgttccatccctaattataaatattttgtgaccatccaactacatcggagagaccacagatttgcttgccctgtctgacagacagtgagagaaaacggtaatgtctcagcagacactagacctgaaactactggccgtcctagtttcggcaagtggataatcctaagtggtgccgagtgcggggttgccttgagattggatccggggtatcctgcaagcccaaccgtcaccattggacgccatcgagcggggtcgaaagtctcgctgcacgtctcatccaatcgaccccatccattacaaagtacggatacgtatgctgacaattcgatcaacgggcggtggagtcgccggtaatttagagtatctcgcttcagctctggtggatctgtggggggagttaccttggacctggatgttctaggaggtacctctgaggtacctccactctgttttgatgtacccccagggtctatattgacccgctctgccgtggatagtgttgatgaagcttttagatgaggtcagtgggcttttattcccaggattcgtagtgtgtttcgtgtagagactttggaaaccaacggaggtacatcgatgtacctccagtctgtcgatgtggcatgacgggtgtggtgtgatgaccccggtcgaatctttgttcttgcattgatgtgcattctccccatactttctgacaataccatacctcctctcaattacagccaccaatcctacgtagactcattcatattgattatcatttcattgagtttcctggatgtaacaactctgtaactccatccctgccatcagggtggctatagacaaatcacctgtcccaataaccaaaaataagtatttcccacatatcacaagtcaaaaataaaaaaaaaaaaaatcacaaaggaaatgaaaatgcagtcgtggaccagtcccccgctgtatgtgtatgtttgccagaaacatccctgtcaccatccatcaaggatctcgttacccctcctttcaaccattcatcttagtcgtttcatgtatcgcagtgtgagaagtgctgccgctgcagtcgtgtatgcagcaccgccagccgtaacccagacggggcggtggactgcgaacgaggtctgaacaatctgtgccctacggcgcgatttgtcttttctgcgttaggttcacgtccaagggagtccatgttacaaagggtctgacgtgtgattacatacctgtagtcaagagtctgtccctccatgtgttggcctgacgcctggcatactgtccggcctgagagcccaaggaggagaggccctgaacaactggtgcagacattttgcttggataaattggtagatagttgagaaaagaagtgtggaatgagaagtatcagctagtcacgatgaggttctgttccagctcttgtcactccagagtgactcgatgaggaccaaaggaatacgagagtaggtaggacaggattgggctcctttatatccagccctcggccgtatcaatacatgacaacgcggggtagagtcacgagacatcggcatacttccagtccatcgacctgtcgagtcccttcaccatgatcatcatggagggaagcgattggatgtcgtgtggccgtcgatccggtctgctgcacagcgccccctggattgctgtggtcatgccaatcaaactccgccgttgctcgactagctttgcaagcttcaaggagttgattgccaccaaatgctaaacgcgtcatcatgataggttggtcgtagcaatcgtgttgctgttgcaggtcatgatcgcatgagtattggtgggatgctcctacgtctcgtatgtgtcgtcagggtggttgcccttggcccgatatgccgcccccatggtattgtgtgagcccaaagttacaccaagaatagcactcagattttcatcaagtaagcaacccatatggtggttatgaggaatcatgattgcgcgaaatagtgtatcgagtcgtatctgaagccttacatataggaattcaatagtcaagagtactagccatggtagacaagaccatagaagcagaagctgcgcaaggtttacaaccccctcagattctggatgtactcactgccagtattctgaccattccgaccgccactccatgtcatcgcgtcatgatcaacacttccagctactctccagccgtgtctagcgatcgtgcaactctatcatctcacagtaaaccctaccatcagagaacggatctttgtattgcataacttcgcatcaccacatcccttcactggcacctccccccattaatttcgcagtttcctttcccgtagaaaaggctctaaatcctagacagaatggctttcgtgtgcttccccgtcatgtgatctatctttactgggagaccggcaaggtcgcctctctgaacctactaacacacattaggccaagtttgtccacatcttctattgttcatgattcgctcctgttactagagatgctgcctttgcttacagatatatattgtggagaagtggggcgattagatggactactatgttatcgaacataacccacacagatcaaagatacacatatttctctcctttaccgggtaaatcacctagcctacccttacctaaatgatacacccgttgatattgcagcacacgcgatccccaggcccatcatggatgatgtgagaacttccccatttaggttaagtgggtctggtgattgatcggcacgtgactatcatcttatcgcattttagctctctctcccttatcgacaagcaggacacatcaaaatctccgagctacgatgactacgctgtctgagacgtgacacttaatggtactacatcatggagtagctacagaataggcgatggatttttaattttcttggaacatcgtgaagttccgaatccgtacagtcccaatgtctacagacaagggtgagtgggcttcattacactttgtttgatgctgtgccctataacttcacttattatgtacccgaaatctggaagaatatgtaattttaactaacgcgtttacttattaaagcagtggatagttgagccttcgtgcgatacttattgacccgcttgatccatagaacccgggccgtcccgtgattctccagttatttccgtgttgtagagcgagcaggttggcctgtctatggtccatatagcagctcctgtgaagcaagagggcgtcggagctcaccagccaaacatgcagagtttcgaggctacgaggcgacattaaaaaaatacggaattgtgctatgaaacacccttgtaatctatacagcattgttggcgcatacagagaatgcgatatatatttaagccgaccctattaacagtaacaactgagttacgatggcatacccttacagtagcctaccaagaaaggccatggagtatatcagagcttttccataaagcaagatgaggagtacagggtatatttaaccggctaaattgacctctacatagatcgacatgggcactttgaatgggtttaatctatttgcatgcaggtgcaccatctcctgccagctgattcgtggaattaccaagaacaaacaatcaattgatgcatgcatcttgccataactaccggtcgcaacttataaagagtctcttccacagatgctagggttcaaaatttgcacacacagtcactgaaaagatgttactgattcccctcatacatctagccatcggggccacgattgcccacgctagcttcgacccatcccacttcacatggtacacgtcaccagccagcaacttcacttcaacgctgccactaggaaatggccgactcggcgcagcagtatggggctctacggtagaaaatataaccctgaacgagaattccatatggagtggccagttcatggacagagtcaacccggactcatacagcgctttagaccccgtacggtatatgctcaaagaaggaaacatgacagcggctggacagacgacgctggaacatatggtcggcagtccagatgagcctcgggcttatcatccccttggttcgttggtcttggactttgggcatgaggattcacaggtggagaactatacccggtcgttggatttgcttaaaggccgcgcggtcgtgcactatgggtaccatggtgttgaatttaggtatgtgagattcttcgcggtagcggtcaacataaactaattttaggtaggcgcgagtacattgcaagccatccagctggagtaattgcagctcggcttacagctagcgaggctggtcggttaaatgtcgctgcttcgctttctcgcggtcggtatgtcacagaaaataccgcgaccgcaggaaacgatactggatcactcaaactgcgcgcgtcaacggccgagtcagacgacatctccttttcggcagcggcccggattgtcactcatggaggtgagtgccctcagactcactacgcataaccactgaccatagaaggttgggtatcgcgcagcgcgagctcggtagtaattcaaaacgcaacaactgtggacatcttcattgatgcagagacgtcttatcgctttgaaactcaggaagcatgggaggctgagatagagcgcaagctagacgcagccatgagggccggttttcctgcgatcgaacaagcagccacagctgatcatgaagcgctcgcaggccgcgtgcatctcgatctcgcgtcgtctggtgctgcgggcaatttgccgaccgatgtccgacttgaaagatacaagacccatcctgacgcggaccccgaactagtgaccctgatgttccaatttggtcggtattctctcatcgcgtcatcgcgtaagactggcacttcgccattaccccctaatctccaagggctctggaacgaggactacgagcctgcatggggagggcggtacacggttaacattaacctggagatgaactactggccagccggcgtaacgaacttggcagaaacgttagggccactgatatttcttcttgaaacagtgaagcccagggggcaagatatcgcgcggcgtatgtacaactgcgataatgggggctatgtcttacatcacaatacggatatttggggagatgcagttccagtaaacaacggaactaaatggacgatgtggccgatgggtggtgcttggctatcagcaaatctaatggaatactatcgtttcacgcaggatacaaatctcctgaaagagcgcatctggccactcttgcggtccgctgctcaattctaccactgctacgtattctctttcaatgggtatctgagcacaggaccttcatcttcaccggaaaatgcgtttgtcgtaccgaacgacatgagcgaaagtggcaacgaggagggtatcgacatcgctccaacgatggacaatacactgctgtcagagctcttccactctatcatcgagacgggcaaggtcctcggtatcaacaacacagataccaccaaagcagcgtcctccctcccacttattaaactcccccaaatcggatcctacggccaaatcctcgaatggcgtcacgaataccaagaaacagagccaggccatcgacacatgagtcccatctttggcctctatccaggttcacagatgacacccctcgtaaactcaacattagccgccgccgcaacggtacttctagaccatcgcatcgcccatggcagcggtagtacaggttggtcgcgagcgtggaccataagtctttactctcggttgttcgatggagacgccgcgtggaaccacacgcaggtatttctgaagacatacccgagtgcgaatctgtggaatacagactctgggcctgggtcggccttccagattgatggtaactttggattcacggcgggcattgctgagatgctgctgcagagtcatgctggggtggtacatttgctcccggctttgccgtctgctgtgccacatgggaaggtgtctgggttagtggcgaggggcaactttgtggtggatatggagtggtcagatgggaagctgacttgggcgacaatcacggccagaaccgggggaaagttggcgatacgtgtacaagatggacagcagtttggtgtgaatgggagtgtgtatacagaggagatttcgagcgtggagggtggaatatacgagatatcactgctatagatagacaaggactgaagtcagcattgctctctaaccatttccctatgatttccaactaatgaaagacgaaagacagtgcaactccaacccagcagaattcgtcttttgttttaagcgacaatgcagatggattgtataatactgtcacacagtgaacaaaagaggtattatgaatacaattgcacaacatcgagaacacggtacacccataagctaggcaaagacaaaaccgaggtatagcccacacaaaacatatcatacaatttccctcaacaccatctgccatccccaagtcgggaatcatttccctgtaataccagaacctccaaacccatatctcccctcctcatccttccctttcctctccgccctattaatcccctccttcgaaaccagattaccaacaggcgacagcaatccgttatcgccgagctgatttccggctagattgtgcacgtcgtcttgtagttgatcaacctggttgataccagcgaccttagattcgttcagagtatctatatccagatcctctagttagccgtcccatcacttcttcaaatgcatgtatgaacagatacgaggtgtatgtacttacccttcgtagcataagaagctttgttatcgccctttccaaaccacttcaaatactgatcttcgatccaaggataccatttttcgtattgaatgttgtattgttcacgaagccagtccgagtacgattgctgctgtttcttttcttcctcttcttgaggctgagagatggggttgagcgaggtcatcgtgtatattttgtatgttatttggtagaacaaagtatagctgttgcacttgatataatgtaaaagcttcgttaagaggaaggctaaggaagctgtgaagtagattttggcagtctagatcagtaagtatagaacttgatatagatagattactccatagggctgtgacgtcggtggagcggcccatgacgtaggaccacgtgagagtctcgatggccacgttacgatgcgtattcttattacaacaaattaaacgaattatattcttgtgtgacatattctgctagttaaactagacatgtccacatgcaggatatcaggtttgaggatgagatggaaagattatagccacaaatgagcgaatgttgcatataaacaaatcttatgtcaagtaaatttgccctagtatatgagtatctataactgaccacaactgttcagcaagctaatgctatcagccaccctgcaccagtaaacgggaatagcttgcttcgttgcagctatttgattgttctgttattttaaatccctagtctatagcttctagcgttgctggagggtcattggaagttggtattctatgtaagttgagtcgaaatatcaccttcccattcaatgagaaaaatgagataatagaaaatgaaaggtcttgcaccttacagtagagccacggagaatcgtttctagagttgtataagtgcattccaagctattatggaaatcccacaagcatgttacgaatctccatgatcttgctgactccggttgtccacactcctctcttgcttgccttcccgcaggaagcctagtgcaccaatgcaagagactccagtaagaatcccaacggtaagaatcaacggaagccattggcctgcaccataaatccctttgtgcaggctttgatcttcacccgcagaggagaccgctgagccacgatgccgggtgatcaaagctgcgcataccccaggccagctggagcataacagagactgaagcaaggaatacccaagctgatctccctccatctggtcggtgcgaggtgattgattgatcagatgaatgtgctctgagctgcgtcatggtacaacggtgtttagcagaccatcagatggaaggagagaataatatgttcggtctagttatgaagttcagattgagtatctcgtaaaaacggtcgtggccgaatattgagcaaagagaacaaaggatgtgttttaatctcgatcctgattattaatgccttccatgtctagttaactaatgatccctgctcatgttccctcttagctaaccatcattggttgcaatcgggaatgcaaccctactttcgtggccgacgtgtatccttacatttcctttcactgcgatagggtccctggtatctgctcattcatcttttccttccataggaggcaatgcatatatgtaccgcatgaagcacaggccgcgtcctgggtggctagaaggcccaatctaggtatggaagagcttgcatatgatgaatcggggagcacaatgatgtgatctcggaatgtgccgcagggaattctacagtaaatgtacaaagactttaccttgaaaacagatacgcaacatcttcaccagcgtgttcattattatattcaatccatccctgtacctctagctctcatgtggtgcccagctctcgcgcgatccaccaccagaagcggtcagacaaagcctctaagcatctgatgatttacacttcggctcacatcttgtgatgaagacaattctctccatattgtcagacgcaacatagagtgatggcaacttggaaaccttcctcaagaccccccgacgacaagcagtcgtgatcagctctgtccttcttgcaccacccaccgaagtccccaggatcccaaggtctgggtcagaatattcatacagacgcaggcatattgactctgctgttcgcacaacagccggggctgcaggtgctctcaccgacaacgagcgagtgggagtgggtacatacacgcgaaggagacagcattgccaatgctgggggcactttacgattccggtcaggagagcggctccagtcagctttgcaccgtgttttaccacttacggataaggatagcgcccacctttatgatcggtactcgacagcgtacttacgagctgcagaagatgctgtatttgttggaaatgatgggaagaagacaacggcggatgaatggttcctgcgcgaatttcagtttcacgcaggattcgtcagtacagcggatggacttggtggcctttggggggtatggagactttaggagcgaaggtctgagcattacaaagacagagcaggctcagcggaatatggcatagttggatgactttcatacaatagatagggatttggtcgtagcatttagtgtaccctacggatcgaagatttctccagtatacgcttttaatgaagctagtatttccctattatagcttcactggagacattatcaatcccaaggtaagtgacacgtagaccgtttaaaattcacttccggtgcccaacgctttcctttctacactgttaatggtaacctcgattgattggctaatcctccacttggctggatatatatacccttggcggtgattttggcttatggataaataaccgttaaatctaacttagtctagtcctttgctactctaacgcaggattagcatgataccgtaattatgttgtcagaaaccatcccgtcttctgtcgttgcactcgtttctggacagttgtatctatgtactgatggtgtgcactattgcatacgcttaccttagatgataaagaaattaggggaagagatgttcatatcacagaaagagccaggcagatggaggccctgtaggctatgagtacaataactttctcagcaactctgaatcagattgacgttctctactttcttcgtttgaccttttcatgacaatcctgagtataaattgcgccaaaatagaagttctttagaaagtatattttaaacacagggcatcgtccaagaactctacaaccagtccgctatctaagttaaatataacttaaagtttgattgtgctgacgatcaagtaatttactcagcttggccaatactcggtaacaggggcatagtaatataacatattgatttcaaaaaggaatttacttataatatacgaataaacaggattggaaagcgcataatcacagacaatattatactatgattacgcaacttttctatgatatattcgatagagaatactagaatgaaattcttcccatcctttcgtatcaaatgatagataataaactatctacaccgctcctatttctaccccacttggacgtcaagatgtgtgatcttaatcaccgccgactcaaaatgaacgcccagatcaatgttcctttaaaccttcactaaaggtctcactagtctggatgcggaaagatcttcaattgattctactattaagaaaagtctctcagaccgtgcggatggcgatctagtcataaatgttgatgtgggcccatgagaatgatgctagtaattggcctttacaaggctattctgcaacttcatgcattgccaacgcagtatgagagaaattcatgaggaggggtacccagctgctccgatttaaggagtttccatctcccccagctgtccatcgaaaatatttccctactaaccctttgctgaattggtctctctatctaatgtatgttttgccaatctcgtatgcgatgagcccagctatagacctacccagcgttgctaacataaactgcctagtgaattgcaataatgtcagattacggatcaattgccagtatgcagctctaatttctccactaagcgtttccaatcggtgtcacgtccctgggtctactcgattagtgattgctaactacgcttagggtccttcgttagccattactatggcgtgttcgataatgcaaatgcaaggtctaccctgagcagtctctatgtacgtttacttcaagattaacgctatccattgctggtgtatggataatcctatggaataaactgatatgatcatagcgtcaggaatcctacctagtatgggagggtcagccataccaaggtccggaaagtatcatggcagccttaagcgtaagtgctgtaccactcatgggatccataataggctattcatgcgatattcctaactttgtctttagcaaactagtttgaataatgtgaagacacgggtcactacgactgatcctgtaccaacttctaactccggtgtactggtagttgtgactggaagtcttgttgtaagaggccctctacttatgatcatgtcttaatcgtggcaattgctgacgtatggtcctgaaaataaataggtcgacgatgcatatgacaagcctttgaagttttcctcgaccttcctcttgcaaccaatccccggacaggctggcggatactttattgaaggtcaaatctttagactggtccatgactaaactgtcctcttttatgcatgtgagatacgcaatgaagaagagtatttgtcctcatgcgaaacgggactcagggcatccgaaattggaaattactttgtgtaatctttctctcgcatagacaatatatgccattggccctatgatcctcgcccacgtgtataggagtctaaaggctctttagaagtggactcttggtttgctgccgaagattggcctatagtagcgttgcttgtcttcgtcttattattattatcattttcgccacagaatgttcagctatccgtccacagtggatatttttggcagcattttggagcatcggatgacggtgcgccgatgtattcagcaacgtgaaagatagcagtaaaaaacagttaaactggaagagctagagagagagggaaaagggcttcagtcacatttataagtcgaaaggtagcaatctttctacgctaaaaagagaggtatccaagatcacacttgtgagtaaaacattgagtcacgaactctattatcaatactaatcgttgtaatatccgttcaagaggatatgaagcaataagttcgatgtaatgcccagctctaatttcaagggaaataagctgtaggagttaaatagcattggacttcccacattatcacataggccatcggcgcttaaggacatataatcgaggagtccgagctcctgtgtccccgaaatcccctcgattccctcaaatggattcgcgtctcgtgtggcgttttcaagaaatatctgcaatgcggcaaagatgctgtctgctccaaggaaatactggtaccaacttgttgttcgaaagtctcggtactgtatttaccatcagaacagaatctgtcccccatcgacaacaacatcagcaccattaatatatgtgctggcgctgctcgccaataatactatggcgcccgtcagctcagatggactgcccattcgtccactagggttgcgctcggcccaaatccggcggtgctcggcaatgccatcacctgcattcagaatcgtatccatataccccggactgacactgttcgtccggataccataacgagcccactccgccgcaagacaactctttagcatcagaattgccgctttgctgacattgtatgcagcctgcggctgcggaaagttcacacggtggccggaaatcgatgcaacgaaggtaatggagccgcccgttccttgagccaccatgcgcttggcagccgcttgtgcgcagataaaagagcctgtggtgttgatatccatgatctttcgccactgcgggataggcatctccaatgagttgacacatccgactacacctacgaaacagagcagcgcatccactgatcccagcacttttgtggtctccacaaatgctgactccacggcgacctcgtcggtgacgtcgactttcagtgtagcaatcttggctttggggtacttcacccgcagctcttcgatttctttctgcgaaatcgttgggtccatgtccataatcataagaccgtttaggccgtgctcgagaagcgcattacacgactgcaatcccaaggtaccggcaccgccagtaacaaccgcatttccttgcactgtaaacctcttttgcgccgctgtggtagggtcgctctcggtgtttgttgctggtggtggggtcatggatgaagggctgccgtcacttaagaccatactgggaaccgctcgtttagtgagctcatcacggctcgatatatccttgggggctgtcattgtgcggctgggatggatgcgaagatgcaaatcttgaattccaaaaagaaggtcatatatggaagtgtatgtataggcgctgtcggatgtacatgaatggcttttattgtagatcaatgtcggtcggagctacgccgttacggcaatgcatttgttgccccgccttctagatgggagccttgtatgcggaccgttctcctccgacgggatttgtccctcatcggtcgacactgagccgatgctctatatactggtacactacggaacaagcacgaaggtgttgattatatttgactgatataatgctctctaaaccctccaagccagcaaatattacgtcatcagttaataccagtaaaccaatatatcttgacaaacgaaagatcataccattcaaccactcaaaaatgcccggacaccatagtcgcctctatagggtaatttataggttgaatcgcaggttgacgacatatgtactatgatctctgcggaattcgccgttttaatctcgaggaacatcacactgcgactttcctgtactggctgccgtctatactttcctgtcttacggccacatcccggtggtactgatctgtcaaagctcggtactaaaggctgtgctacgctggacttaacgtttgatttttgatttcgtatctaggcatcagctgtacagatatatctagactccgatgaagaaggatcttcagaaccatgttcgggattcttcgccggggcgcaattgcggtcactaacgtagttaacgaaatgtaggactggcgagcaccctatgacacaatggtactttgatattcgggggaagttgtattgggccctaccaatgcaccttttcttcgaagtactttataacctcttagtaattgcggtaggctaaatcttactgtaagtgtccggcctataatataaattaatttataagatggatcttagaatgaggaatggtgaagattctaggtaggggtgatattgatctacagtcaacttcggataggtgggaagaactatggttggatagtataaaacgtactttctaatctgaccatattttaggaaggtttacctaacaatgccaagagccaaatgaggctgcagtacgattactggttctcatatcctattctaccggagacgccggcattgatcgccgccggtggggttcctgaaatcgacgtggtgttgtctatttggcggggcggacatgcacagatttcagatgcatgcaacattccctccatgtatgaattattagttctcattgaatgataagttgaatgcagatttcttcgtaccatgagtctcggaaagctcttccggaggtacccaagcgcttaggtgatgagaagattcccatatccaatgacgaccaaggaaatgatgctggacacgtttcattgcagaactttcatatctctgcataattagtcttagtgcatacttcagaagccttaatagatctgcagacccacctatatcgggcgggggatgggattccatgctgcatctcattgactgagcgcccccctggcctcactcttagatgcattcattactagtcatgatcatacttgatttgatatcatctcttctcgtgtgctgaactcatatagtatctacgccaggggtcaatgaaaaaaggccacatgcggaccttctggacaggcgtcgcataccagctgccgaagaggaggccttctcagagtgcagcatctccaggctactcgtagcacatgggcactatacagtcatatagaaggattagtcgtcagttatttcagagacagacttcgggaagcgcgaaggcagttgctactcctcttttgcatgtggatcggctggcctgtgcggaactattcatccctctctagacacgtacaggataactatgtgcatggtgacgtgtcttcgttagactcgattgacgatccgaactggattgcactgactaatgctattcgctgtgatcctaacaaaattccaaatctgcaatcatcccgaagagttcaagggaaatgattccatgggataaaacctccagagagacatataaagcccatcaaactctgccctgacctgtcacttctatatcttcatactcaatatacctcttgctgaaatagtatcttaaatcagaaaccattgcccctattattccacttcacaatagagcccccacaatgccaaacgcagacatctacaaagacctcaaagacaaaaaagtccttggaacccagattcccgtctacaagtccggcgacctggaatacgaagtctctgttgatgttgccaacctcctataccgctttagtcgccccacatgtgtcgtgaagcccgagctgccagtgcacgtggaggaggtggtcaaatatgcatacgaaaacaaaacacccattaccgtcaagaatggcgggcattcgtatgcaggactctccactaccaatgatgggattcttttggatctctcccggatgaatgatgtttatctccagcataagtctgagcctccgaccatcaccatgcaaggtggggcgctgtgggcacatgcgtatcggcagttggtgatcgaaaaggtcaataaattggtggttaatggcggacggtgtccgactgtgggagtgagtgggtttgtgttgggcggggggttgggtccatttactcggaagtttggaatgggatgtgatagcttactggaggctacgctggtcacgggaaaaggggatctggtaaccgtgcgcaaggacgatctagaccccgaaaagaggaagctgttctgggcactatgtggagccggtgcgaataatttcggtgccgtgatcacgatgaagatgtctctccacgaattacaagaggacaaggttgtggcagggagatacacctggtacccctcaaccgatgagagggaagaagggttcatggaggcaatgaacagcttttacgccgccaattggagcaatagcatgaccatcgacactagctggttctgcgatctgaaggatgggaagggtgatcttgctgttcgctttcttacctattacgacgggaagaagcaggaattccaggaagaaatcgatagaaatcttcgcggagatgctggaagtgatatccataaaataaagaactccctggcagacaatctcaaacgtcggtcaattgctgaagattcatcgcgttttctgcatgagactcttgtatcccagtggtccgaggagactaagaaggcgattccctctaacaaggcgtattcgatctacgcatcgttcgttttcggaacaggaagtgattacacgggtatcactaagtctatcagagatcacatgaagaattttaagaaagaattccgtggagagtcagctttgttgcaagtgacctttatccataccggacagcaagccacccggatcggggcaaatgaaacagctttcccttggcgcgacgcatcgcgtatcgcatacatcatgcttcaatgggatgagaaatggcttggcgaggagatggtggagttctgcaagaacttcaaagagaacctgatgcagttctctattgatggaaaagccggttttctgaatttcccagaccgggagctgtgtgtcacagaggatcatcaccaagcatattatggccctaacagtgatgctatcagggaaatcaaacaaacgtgggatcccaaagggatatttcagtttgccccgaaaaatgagagagatgagtcgatcgccacagatatcgtgcctatccttcaagcagccttgtcaatagaagagattgtttcggcatcactgccccatctgaaccctttgatgacacttatcagtcaactgagtgccggaaacctgtcatgaaagcttgggcaaagtagtaccttggcacaaaccgcagagcgagaggggaggtggcgcatttctctatagcgtttggcttcatattacactatacaatgatattgaagtatttcgtataactctactacctaacactcatgatttgaactggtaattaaggaagtacatagccaccatcaattaacacatcactaccagtcatatacgtcgacgcatcactggccagatagagataaagacccttaatctccttcacatgcccctgcctgccaagcactgccatccggtacgcctcgttcagagcaagcgggcttgcacccattttcgtttcaaagaaacccggagagacaatgtttacccgtgcaaaatcccgccattcacgagcaagcgacttaccgaactgggtcacaaaggccttggatccattgtagacgggttggtcggtgggcacatttacgatatgtgcgctcatacttgacgtgatgatcaggtttccagaaccttgacgttggaatacttcgcctgcatattttgcgcaggcgacaactccgtccactgaagtatattgtcagtatatagttcaaggagattccgaaaggtttggaaatacacaccattaacagacatctgcttcctgtattcatccagcgtctgttccaggatcggtttggagatagccattcctgtacatcgtcagtgatatcataaacccagcatctacaagcccagctcaccagcgttagcaacgaagacatcaatcctctcaaaatccctcacaacatccgccacggccttctggacctcctcggggttcgatactgcacgtcttagcaaccaactatagaaccaaacagagaaagagaacataccatcaaccttataagcaacagtcctaactccatgatccttcgccaactcttcacccctcttaatagctgcatcatttctaccagttcaacaatcagtactcaaacctaactcacccctaaccccagaacagaaaatccagtataaaactcacgaattataccacaaagcgacatgggccccagcctcagccatagcctcagcaacagcaagaccaataccatccgctgcgcccgttacaacaacaaccttgccgttcagcttaaactgctccagtacattcgcaggagtatccgggaacggtcgtgggaagccgtcccggatttgcgtggagtcagataccgtcatggacatttttgcgagtatatgtatgtattagttgggtgttggggattatgaacttgggtggtttacagatatttatgttggtctagtgggaaaggctgaagcttggtttgggatccccgcattgggggacctggaggtcggggcgctgtgggccgatggtctggtggtggtatttaaccgattcggtatttaaccgtaggttgatggtggatacttttacttgagcgatgggtttgctgggtccaattgtggggcttggagtaaatcgtgctgggctttagacgtactgccctgtagacctatctaagcggcggatgtttgagatatcgtgcgctttggtataaccacgaacgaccgaaagtcaattctctaggcgcacctttggtactagagttcatttggcacataaactaaatagaaccacatcactaactcatggaatgaacaaacattttttttttttttttttttttttttttttttttttgcaaaagagaggatgcgagtagctccctaatggcatcagtcgtttggccacacatacggagaattgttcggtcctgtaacatgctcggatttgagttgcctatattttctattccaggacaatggcctcaaaccgacgctctgcttctgcccatttcctaagaaatatccgtcctatcccaacacgtcgtgctacattggattgctcatccctcctgatgagcatgacatgcaacatataatacaatccccattctggtgatagtatcttttgcatacgctttgagacgtcagtcttgccatcagtataagccaaataattcttatattccggatcacaactataattaccgaccagatcccagggccaagaatcctccgtcacggaaattgcgataaattcagcaatgtagctggtggaactatggtcgtaatgtgggatgtcaacatatccagagagctccccattcttggaacggatgcaattggtgtctcgcaaaggacttgtgctaggaccgactaagaacttcgcggtctgactgtagactagtatacgagctcccagagacgctattctgacaaccgccggagaaaaaatctcgtcatgtcgatattggccaaagacatcctcccagtaagcggtaggatcgggccatctagaatacaattgctcacagaccggggtagcaagatgtgcgtctagatggatattactctgcaggcagcctgtgagtaacgcgctagctattatgcgcatgcggtcctgttgacttggatacctccaatcatcccattggtgtccagggcgcggtttgcagaaaataaccgctgtgcctaagccacgtggtggaagagcccatacagcaagtccggcagctgaccacttcgggcgagatattggaccacagtgggaagcccaagaccacgttggaaagccatgcctcctgcttgtgggtgctgaagtaaacttggccggagcccaaagaattgcatcgtcaatctctcgagaaggtaagccatagtatgtgttctctttatgaatagaccgtaggactgcagtaaaagccctcagaatatccgaagggaaagtcaggtctctagtggtgtactgctctaatgcttcccaataatcatctttctccggcagccccaaaacgttgaaaacgttgaggggcgtatgacattcggattcagacaacacgtgagtgtcgtctttgtagcgaaaggcacaatgaacaccatagctggtgaatagaatgagccttgaggagaacatagcttcctgaaacgtccaacccctagtataccatttactgttcttcatgcagaatcgaagacttggcgccagtgctgtgataccaaaactaccaattcttatacacttatagctccaggagcgggccttagtaactccaggcaaaccatgacgggagtcctcgcccgcaagtgcaacaatagtatatgccgcgcatccataaatacgactcatctggttgatttggtgcaactggtccacagggtcactttgattaatacagagctgatcaacccacaaatatttaaagccaagtttgtagcaagcgacgatggcatctctgattgttgttggcagactatagcgatcgaaggatcctgaaggggttgaggcaattgtcgtcaagctcccaaacacatagcttagagcaatatattcacagcccacaggcgcttcgacaacccggtcttgttggacatcaatgagttttagtccggctggtcgctcagattcaagactcaaacccgaggttggaacagatgatgagttcaataacgagcgaaccttaccccaatccacgtattggcccaaggtaggagggatttcgggcgtcgtgacacggtctcctgacctctgcaagtaatatcctcctgactcaggaagttctgaccacaatgcaaggtccgcatgaaaccggatatcgtccaaccaaactgaaacgtatagagatcggcaggtaataaaaagtgcactgtggtatgacgtgcgcagatcccgtcgcacggcgctgagagaggtggcagcagtatgggcgataagctgacaaaggtgacatttgatcttctctccatcatagtcctctgtccatccgaagctcacacaaatatatggtgggatggacgcgtccggcaaattgacagcgacacgcttggcaagatgcgggaggcgcaaatgccgacaacgtggacatagccgctgatactcctcgccctctgacgggcagcaataggcatcatggcactctgtatggaacacttccctaaaagtgattaagggttcagataagccccagtgcgcttctttgcaaaacccgcaatccatcgctatcagctccaagacagctcacttggttgattaggttgatcttaagtctcttccagtcttcagcctcgtggtactgactgaggctatgcattagcttcttggcatccatatatgaattgtcaacgctagttgcccctcttcgattgtccaaacaccaggaagagaacggctgactcagcttagctatcatgaagattaaaactatgtggctagccagacaccttcccaccgctttatcacagtttcaatgattggcagagagccttgaaccccatgttttctcccatagctttttcagtcctctctgccgtctcccatatagagctaaagaggccactgagaacctcctgcgtataatccaggctacctacttccttcatctgcgagatgatgtacgactttgcctcctcagacattttcccctcgtccacaggttgtccgtcatatatcatcttgtgtaacgtactggcattgggactatgctcgagcagatggataagaggaaacgaaaactttccctcggaaagatcatcgcagaagcccttcttggtggtgtactagaagcttttagtccagtattgaacaatcacactagtagaagtcctacctcgtcagaagctatattctggtaatcatccctgatttggtagtacctccccagcagagtaattaaatgacgtagctcgtcgtttggcgtagcattggcttcaatctccatgatccgaagcatcagacggaagaaacctccagtcttgtggtcgatcatgacaaggtattcatttacactgggacacgttttattgaatgtccagttgagatcgagagcttgacctaaggtgagggtttggagttcttctgcgagttttcttaacactgcgtcctcgatcgagtaaagctggcatattcttaccagacagaactttagcacactctagtcggagatgagtctgaacctcggagacaaccttggcaattatatacgtcgtgctgtttattgtttggctcaggccatatttaacgtgtgctgccggtgcaccgcgccgaagttgagaaccgtcttcgatatcatctagcctgtcaagaatattacatcagttcacctctacctccctacatcggatggtgagaccgtacatcaaggacgaattctgcaacatcgtcatgacgtccgtaaggaccgccgcagaacgatcggaaatattcaaccaaggccgcaagctctcgattaccttaccaacggtgttcttgccaggaagagacctagtgtattcgaagggctccatgcagatctggaaaggatcagccgggtcagggcagttctctgaacactacggagtatacataccttttctgcgtcggccttcgtgaacggcgcgaggatatcgtattgggtatagaacctattactagttgttgtgccctgcccctcatctgcgtctgttccttcatgattctcttgatcatccctagggcgccggacttgggtcatgttttggtcaaactccaaagcttggtccatatttcgttgaggcattctggaacgtagctttaattcgataaaaggaacgggttctatttccgtgattaagccaccgaactctgctcacaatgaagaagaggacacttcgccactagtcaagattatgcagaagggcccaacgtgccccactactctaggcaccgatgtcacttcaaaactaaaattaataaagcggtaagctgtattcttatctttatcgataacgataagaataacgaataagtacggcgggcgaaatcgaggttgcggacaatgtaaaatcatacataacctaggaggggtaaagttgtttatttccagttctgtactgtccttttttgtatatatttagacggttaccagttggggatcttcatcatctgaggccacaggaagcgccatttttcgactacctctccctgtggtctaccagtaagaatcatactgtgtaaagggttcggcaacaccgcgcgggttgccctcctaacttagggggtggttgcaggctatagttagcttactgggaatagtccgaagtggagatagacagttcaacaatggatctaccctgttgtattacgacctcgagtggacgcttaacgcgtataaccgtagggtgtggagaacagggctcgaacggatactggccactagttgatcgttactattatctgcaatcaccttccaaagctctgaaatggactacttagtattgttatacagtatgggctgcttgaattgagcgttgtcccgtattccctactctatagctggataggacagtctttgttactgcgcaatgaaattttatgaacgtgaacttcagctactgcattcggcaagataaggttatttttggagatgggcttttgacttggatagatgtgtgattcgcatgtgcatgtcctagcttgaatattctatactttccaggcagcctgaagaaggtcattcatggagagaggcttgatatccggaaactgcttgttgagggtaacctcgtccggcaggttgaaagcccctgcctcagtccattgaccgaacacagccaagatatattgaagctgttccttggcgaaaaagggatatacaggaggatgcgagggaagttcagtcacttgaaaagtcttcagtttctcttcaccgtcgtatgtgacatcgaatttcgtccctagaatttcaaggtcaaaaaagatcataatttgtacggagcgatgcatatacaaacctttagtggtttcagccagagacaccaggtcgttccatgttaacttatcgcctatgatgatgcttctctcattccatttttcctcgccgataagtgcggcaacatactgggcaacatcgaatgtgtgtgtgaaaaccacaggaacattaccagatccaggaattgctgcgctgttattcgctatgtcaacagcgaaaacaaaaggctgcaggtaactcttcactttgggcaggccatagtaatccataaagaatccgtttgataccagagtgtactctagaccagatgacctcagcttttctgcagccaacagtttacccttgagaggtgggaaaatggaggcatgcctatgtatagtcagcggaagtgactggttgataggctacaacgaaactcactgttcgttatatatgataccgaaatcactgggaatgaaccgtttggtactcttcgatttgatagcagcctcaatgagattgagctgagagtcggttgctgattcatcagaaatgggaacagtagagataacggtctctattttgttttcttccaacgccttcgtcaatgacccaacattggaatagtcgaccgggataatgggaacatccagtgtttccgaaagttcatcgttcgtctgatcagacggtcagctagtagtcagaggtattacattgcaaaggtttccatacacttcttgccaaaatgaatacagaatggcttttcttgttcttcaaagcttcaacaaccgcccggcccaattttcctgttccaccagacactgcaagaatggccatcttatctcttggctgaacaaagtcttaattgaatcaagtgacagtttccttcgaatatgataatccaactattctttctgatagctgggagagctactttatagttttcctaatcgactagttggttacaattccaaattagtcatcgcgcggactttggcggccgctggttaggagcatctgtcagcagaattaccaatcactagttgtcgagttcccctcctagacaataagcaaccaactttcggccagtgagacagtttatgcttgtggcaaggcttcataaagacgtcctacaaagacttgtcagctccactatgattctaaacagagattcttatagcttacttgcaagtctccatcgcgtactaaagtgcagaagcatatccatgaaagtctgtctctccctgagtaagaacgagtcgctccctaccttctctagcgaggtcatacagtccaatacctggaacaggattatgatgggaaaaggagaaggaaagactgcagttgatgtgttcaaatcgagttggctactcgatatatccatcagcaaaccaagtagttctaagctgtctttgcgacgttgttcaaagctttcagcggtactgtctcctgccgcttacagccggcggtatgtgtatatacacagattcgcactaaaaggtgatcgagctacttagccactgcacgggcacaaagttgcatgtgaagcttacgcgaagactgtagcgatgcacctgtgccacgaatagtcaccacggtgaccccaaaaaattaccttcaagctctggagctgagcttctagggctccgatatgattccatatcgcatcagctgacaagcttgtaataccggcagaagcgctaaacccgagaattgcttgaaggcgaaccatgatatcacagcaatccgcttcgcactgcagactattcactgtaggaggtcagatcggcatgtttcgacattattaatgatgagggagccagacctggaactgtcgagggcttcgtaatttgagagtagtcatcaataatatgtttcatgacaaccctagacgcaattttgatatgtctgtcatcgtcccgtgatgttagcgaacaagactaaaaagtcaggacactaaaacttgagtagtacctatcaaggatataaattacaagaagaatattcgtctcttcttctttactggtcaccaattttgaggacgaagaaacactggaggtagctgagagtagcccaatagcgccagccattctggcgcaagtcccaatcgtaaggtaagcctggcttcccatgcattgagcatgttcgtatagtgcaatcaatacgccagcttgaatcaactcgatgcagggttcattaagcgacaaaaatacggtgtaattatgcttgcaagtccggtataagtccggaggagacgctgtgttagaggaaacgaaacttcccaccggctcctccgtcagtaaaagaatgctcgagatgaatattaaaaaaggtgaatgcggttcaagactttctgcttcttgagttcggcattcaagtctttctttggagatcaccggcgcataattatgtactacgctgagatatttttcgcctaccgctcgcaccgaggtgtctctctcatcaaggatcttggacagattcattgctacaataagttccaagtaagacggctgaagcaggctgggtctcagctgccagtctgatcggttatctcccttgcattgatcaggcgcggctgcaggtcggtcctcttcggaagcgaaaacgcgcgactcgagcctctccagcctgtcaaagacggcttgaaacgtactcgtgaaatcctccgctcttgtttctgctacattaatatatgagcaagataggcagagcctatatacgataattaattgctgtgagaatttttttacatgaaacaagtagcgacaaatgtcatacctggcacagcgattgcatgttggcagggtcttgtcacatttcttcttgctcgatttgcaagaaacgcatgctcgcagtgcaagttgaggggacacatcattgtcaagatcaatagtgttcatggtgacggtggtaagttattaataacctcttgatcaattgaaaacgatgtgtaagggagatattctaatcatagtctcgaggctaacttagttaactgcataatgacagttacgtaatcaccatctcggcggctgggcggccgccgccattttgagcctggggcgataattattaattattcatcaccatgagatgataaaacttatgcctcctaagcacccaataaatagtgttattctcttctggttaccaggatgaccgaccgtgaaccaatattcaaatttcgtccgctgagtctcatgcaaatccaataacttggttctttcactggctggcgtgataatgtccgagcatatactcgtgtttggcgccactggtgagtggccttctatcctggtatacttaaacactcgcgcgttgacttctcacccgctcctcattttcaggcccatctgggactgaattctgctccgctgcattgcgacaagggcaccgattaacccttcttgtacgaaccccacaaaaacttccactggaggtttccgggaatcccaatgtcacagtgatacccggcacgtttgaggacgtcaccaaaatggagcaagctgcagggtgtggggcacgcattttcgtgtcatttgcaggccctacatatgggtcaaaggagacggtaagcggtctgatttttattagtctgaacttcacatttgctgaacttgagaacagcctgtcactgaggcaatcaaactgatctttcctatgttggtggcgaacaattacaagcgggctatggtacttggcacctcttcctatccgtcccctctggataaaggcgccattaagtggaaattatccgtcgcattgatcaaaattatcgcagggagtgcatacgaagaattccgcgggttgggtgaatttgtcgcatctcaggaccctacccagctcccatggacgttattcagggtacctttcctcactaacggggctgaagcaccggtaacagccacatatacgggacacggcgacgatggcttcttcctttcacgtaaaagcatggcgagttgggttttgaaagagatggatacaaactctgttcaagtcggtaaaactccggtcatctcaaattaatggtattccagcatggcttggatttagcagacatatctactttatagtactgtattgtgaatcagagcttaatgaaatagacgacacaattcctatgtggagcattcttccacatagggctcaattacgtcacatgcctgaatagcacattttccagtcatatccacaactgcttagcttacttactttgcatgctgatttatctcatttatgggacggagtatggacattgacagagatgcgaatcccatagatgatcgatgtactgggtcccctatgttcatttcggcgtttagccttttggcctttccgtgagtattctataatttgcttccaggttttcaatggacaatgttaaagttatcccctagataaacggtactaaatacatattattattgactgttgcggatcttttcacactccggcagagcccatttcaccatccattcagactcaagaacctgctgagcagatggacgatgttccggttgaaagcaaagcatcgagtgtaacatcgacaaaagagcatattgttcatctgacttaaaactcggcatccttgcctcgatacgcgcttgctgcacggtatttttgaagcggtcttctaatgatcgatttaggtatttggactggtgaattgattctccatgcttttcctgccattcggtcggtaacgggccaagtagcccaatctgctgacaagtcatatcatcctcgtctgtcatgatcccttcgaataatgttttctgggcaataatatcccgaatagtgcatgcaagtgaccagatatcggatgagaaagtaagaggctttgtaggttcgaatcgagcttctgggggacggatcagaagaggtgtatgagactcgaacttgtcttcttgcgctggagaaaatgcttcaccaaagtctgacagtaggattcttgattctggaagagttatattttcgcttgcttctccaggccagataggtactacaccatattcgggtacccctgctggcggcagcttttggccatctaagcgattgactggctcgaattctggctcaccatattccttatatattgcttcagtagatagttcagtaaattcgcgagatggtagaaaaagcagatttcctcggtgtaagtcaccatggacaaacccctgtgagtggatatactgaactgcaatcacaagctgtgcggctattgcccgtgctacctcaagttgaaacaggctaagccatgattccttctttgcatcggagacactcatccttgctgggctggttaccagacagacgtgagtaccattaggaccttggatgttgaacttatccaatatcgaaggaatgatagatctgcctgtgtctgatggctatttaggatttgatagccttgccagtatatcaatctcgcgcgggttggagtttgccctgcagactttgactgctacatttgtgttggatatctcgtctcgagcaagccagatagttgaataactaccatggccaagcttatggattacccgatagcgattatggaaacaatctccaatttttactgggtgataccctccaggctcataatactccattctctccacgtactcaataggccggtaccggacacggcctgtttccatggatgacgacaatgatttgaagctagagaatgcatgggatgttcgacggggaagatatggcgagactgccatgaaaatgagtggacagtgagagaaggaggaggttgagtgcaagggcatcctcaacgaaaaaaatgattttatcatagtttttgcatttgattattgctattattggaatcctctgtagatttttggaatgggttggcgctccaggagaaggaagcgtttactgacggtagatccgggagaaccttattccggatggctagaccagcttcatcatggctatgtgaaggattgggagaccttggaattcgaccatgccacacatcacgacgagatgccagacccgacgaggaagaagcggggtggtgttgtgtggccatcggacgatgcactagcaattgcaccggagattggtgaccagtagaaaaggcgatgcttatgatatcacaagggaagggataaggatcatatcataaattgtttgttttcgatgctcaaaaccatagattaattggagtattcaagctagcgagtttttttagatgtttttaaagatttttggaaggtggtggcagagacacggtgtgtagctatcctatagccaaaagggtgagcagcagccggatcatctacgtgccgggccaattaggaccgcccggctgactccctgaccacatccaaagttggatatctcaaccaatgggttctatggataaggtcccacgagtagatactctagccaatcataatagcccaacatattcaattaaatcggtttcaaatttaatcctacagtacttggaggcacggtgaaccgagatatagagcttaaattttacttagtgcagcatacttttagtatcgtatacaatagactatagtatatctatagattggaatatcactacctagacaatgataactatcagtgaataacaaccgtagcttaatgtaaaagcgctaagggttcggtaaaaatcccggttagtccggcacctcaatttagtctgctgtactagtagttaagagatccgataacccgcgtagctcaatctccctgaagtgaaaccaaaagtacttcttacgttttgcgactgactgtcgcacatgtagatttctctcgtgtttgattcagtacatgataagcagataattccttgtcaggagtggcatatcagcgagaatgcctgcacccgccggcacgcatccaaatccgcaggccggggtaaggaatgcccctcggagaaatgatcgacgtcgccaagacaaaaaagcgaagccagatcacgttgaacatgccacaggtggtcagcctaatgctcggttgcggcggctgttgagaataaggcaacggggcagggagaagcgcaggcaaaagaagagagaggaggcacaacaggcattggaaccagtaccaccacctgagtggctgtctctagactccataacaccgttaagcttctcagatgtgccgttgccaggacccttcatccctacctttccgctggctggctcactgtcggaaacacatgctgtggatcgagaaatgcctctggaaacatccgaggccacagatcatatcaagtatcctaaagatgagacagcggttcagggcccaaagattgagggggacgaagttgatgaaggtctcaatacacttgacggtgacgagtccgacgtgagcgactattgggattcctatgagaaataccatcccgttattccctctccttcggatggagagctcgataacggcgttatttaaagtgagcaggaaataaaggacaaacagcgggcctacgaaattagtaagattgaagagatccaaaatgcatacaagtctctcaaagcagccttggaaaaacacaatggacgcccacggatttccatcgccgacacacacttccgcctgtattccactgactatttcgaccactgctacaagccggaacattatccatcgaaatatgttaagttttatcactggaccgatgatcacactaagatgaatggccatgtaattctcgactcctgcttcggattctactttgagactttttcttcaccaacatacgcaagtccacacggtgtcaacctcaccgaaaatgaaacaaagcatgattgtagtaacgattacttgatactcgtactcagtcgtgaaggtgtcttcgccccagaggatccccctcctggggccccgcaatatttcacattcttcggtgtccgcttcgacaaggacaaggaacgtgtgaaacgagagtcccggttgatgaaaagccagttggtggagaagaagccgtccccatctcctgatagttcgttcgagagcgctaacccctggtttgaatacatcgtcgaggcagtatcttctttgactaaggctacataattcaactgatatatttttgtaggcaaacaggtattcttccggtggttagcgcagaaacagcgttcaatgtcaagctgcaagcaatgcgacccattgaaatgcgtagatatttatttttttacccctttgttttataatttatttcttttggtctttatttcctgttctaagattctggttttcactcatcctaatgcttgtctgtcaccgaaatctatttatgtcatgataatttggcgcacctgtgatatatattttcgtggatatacacattctaccttgaaacacctcactacccgtgccaatccatcaacaacataaataataaacaccccacacttgaatatatgccttttaatttctaatggcgccttccttaacaacttgcagacattcagttagggtaacattccctactctcggctcgacctgaatgggtcatccgagaaaaggcatggactatcactaaccttcttgaaaccaaacagttgcttcgatatgattgcgaaaatacgcatcatttgtctttgtatttctcggacttaaaatttcgaaaataatgattttttctgaacactgcatgcatgtgttcttaggtatttccacattgaatggtcgatccgatggatcagtacgtacttatgactactatttaatggacaaataataaaacgaacaacttctatttctaaatttagtcacagaacaaacagacgagtacccgactctatcacacagaagagcaaaactgtgtacgccagcatacccgaaagcaaaacaacaatatattaaacaaaccagtagtggtcgtgacaaacaaatacagaaggaattgaggattgtgtcagcctccgatcgtgatcaagcggtgcacgagagtgcaggatccaatttactccatgtgggaaggcatgacgatggatctcctatggcagaactctcgacctcggagaagattaaggagagggagaaggagtagcggaggaggaaggagtagcggaagaagaagagggcgaggcggacgaagagctgctggaaccagagaacttgcgcttctgagctgcgaagctggtgggagtcacggacgcagagctcgaaggagtagcggagctggagggggtggctgagctggaaggagtcgcgtactcgcgtctgtggaagacccatggggctgcgacagagctggatggggtcgcagagctggatggggtcgcagagctggaaggagttgcagagctggagggagtcgcgtactggcgtctatgaaagacccatggggctgcaacagaggaactggatggggttgcagagctggacgcaataccggagctggagggagtggcaaattgacgcttgtggtatacccatggggctgcgaccgaggagctggaaggagctgcagagctagaaggggtttcagagcgcttgctaagaccagcgaaggcgatgctggacgagctgggagaagcgctcggggtgacagaaacagaaaccgagctggacggtgtagaagaagcaccaaatggaggcaaggcagcagcgcagccaatgaggctgacaatggcgagaccagtgaacttcatgttttattgtgagataggtgtgagctttgtttgtttctgatagtagtgtatatgatggtggtatgagagaaatttttgaaaggtctctggaataaggtgggccttttataatggcttggaatcaagtgtgaaggtcgctgctcggcggctacagtgtgattcctccgcttcagccgctatgattttttttctcacggttttagtgctagataaggtaacaacatatggggatcctatcgtcgggaaccgggccatggccgacgtcgggaggttggggctttgcttgtgctgtgtgggcgaatgacggaagacctttcggacctgcagtagccagggacatgaattttgccctggggctatcaacctcgagccatggtgcaacaatgacatccaagggtccgacatccaaggtttggcgggaacgtgtctggccgtgctgatcggcgatgtgggactggccagcgccagactatcaagtttgttgtacagcgtcgggttgcggtggcaatggacccactgcgcctggcaacagggctcagtgcaaaagccacaagcattggcgtgatatgtttattacgacgtccctccagcctcgtgctttgttggtggcgagctctctgagccataggatgaattcagggtttatttctggtcttccttcgacttgttcgatgatacagaagctgtcttaaagaagcgcgctcacatgaagatcagtgctgatcctgtggggcatgatcaaaacggtgataatctgtatccaatgaagacaccttggctcaggcggtgatgggaatcgactcgatatgcgaccgctaccttgtggctgttgggtattcttctcaacctctcagcatcggatacttcaatcaccacggaggtggttgttggaaccgcggatcggcttcttgttcttgccgtacattggaggataacgtatccgggcagaccctgtgacctatcaactgcattgagaactcatgatcccaaggatcggaagcgaacccttctggtcggcttcaagaggaaagtcggtccggatagataaacagtggctgaactggccgaatcccattcaacgtttggcggctgccgctcagccttttccatgtgtggtagggatcggtgcaagtagtcatgccgagaaaaaggatttttcttttttcttttttcttttcctgaatcacgctgcataacccagggatgtgcattgattaggatgtcgaaatcataagcctattggaggttggggtcactgaggcgctatgtaaatcacgacattatctatcgtatggacctgcttcaaacgaacacatgcacggtacagccctccatgggggctggggatgcatctggtgggccatgatcgctaagggtgttggatgaggaaatggagagtgaatatcaggtggactgatatcatgcctgaggtcatcgtgaatgccttagtgcctttcaggcatcgagaccaagtcttgccgccaaaatatcctcccgccgcacaatcattgagtctatatgctttaccagacgaaccggaccctggccgagtggataactctggaacagatccaccaaagacacgggcacaggctggcggtgtatccccacttgaattctctgcagcattgctagttcccttatcatccgtcccaaaattagggcaatgtcctgttagccatttttgttttcttttctatttactgctacattgcattcgactagtctttagtttctggttagttgccgatgattattccatctctggaatggccggatttgaaatttctcagcgagccgagatcggcatacccggcggcatcaaatacggtggccaccatgtttgtccagtgaaccgcgggatgaacactcatactacagagcgggaagataggggcggaagagaagttgatcaaggggtccggtttcatccctttaaataattaagagcgcggaggaccccaaggaggcttggcatcaagatcatcaaggctctgcatatggagacactacatgtcctcaaagtgaaacaggggttttgtatcactaatatagtgtccgtaacgacttgtgccacaacaactaaattgtaaaggctatgaaaattatcgatgggcgcgagggggtattcaggccgtgttctaagatgctacagaactatagcgtatggcccgccccactacccttcctatcgatccgtttaatttatacatgtggctattgaatctttctgggatagagacatggatcaaagtgacatagtttattaaacgtttaagttcccctgtctatcaactctacagcgcaatgaaggattcaagcacccacaatgcgagactttgggttagcgctgtataggagggaccgtgcgatggtggacggacgtgcataggcctaatattggaggccacagcatacattggataacggtagtgatgatactgaccaaaccgtgcctgttacctcctttgcataggagactcttttacaccttcaaaatcaacaattagtgggaattcctaaaataacaccacatgaccactaaggtggaagagagtgggttgaaaattctgcgagaagtacaactttatgcaaaatacataacactatactgatctttctgcttgatctctgctttaacatgatgaaataccaatatcccggaggctgacttttcacaacataagctatgttagggatatattcaatggcttccgattgccacctctcatatttagtgatctgttcattgagtaattctcgatggtattaggttggggacggggcgccgatggaagtgtattatggccatgcaaattgccccgtttatcagaagcattacccctggccacatttcccgaagttggcccaagtggctgtcggttctttacccaggtcacgtcctcaaagtcgatcacgatagcatgcccaaggctatcattccacagaatgttgcgatattcgaggtctccgtggactataccatgagatcgaaggatttttcggagcttaatgcgttcctgagagaacagagaagcattggcatcattttgcataagcagggtttccatacggatcccagaccagctgaggatcatcatatacgacatacgctcgccatgataccaatatggcatgcggggttggaagctaccgatatgaaccggtatggaatggccttgtaactgcagcagagacccataggcgtcgatttcctttcgtagattatgctgtcttgcttcggtggtgacctttataatcaccgtgtatccatgggaaagcaaggtagccttgagcagaaaacccgttcgaccgcgaatatgtagttgctcaaagcctttgtgtcggtcttgccgcagctgagcatgtaacctacgcgtaaagtctctcgaattgatttggtgtctcacagggccgtgttgatgaacatttgggcattgaaagtccaagtgaccccttgtaagcaagcctcgaagacacaccatggtgcagtacttcctcgtattcgatcctctattgggattacttgagccagcgagattattttgcgcgcgtgtcgctggggcagggtatggtggcggaaaatcatcttcatatgcgatattcctttttaagcttccttgacacgttttctggttaggctgacaacggcctcgcgaccgtgtgtgatatggagatcgctcaacgggtttccagtctgaaggtttgtattcaaaatagggaggatcttttcggattgtctctggaatattcttcagaatgtgaagatattccaccttccaagtggagaggttcttccgggcggcatcaaaccaatcttgagatggctgttcggcggccaacgcgttgagtgtaaaagcaagcacctgggccacagcggttcgatggagatgatacttgtcctcgggattgacatctctattagggacgcacaggtaataatagactaccgtcgggtcgtcagcaatgtggaggaaaacgtaggcctctccagtgcaaatgtatccgtttcgaaccccactgtccaccatgtaggagaaaagctgtgtgattgctgcagcgaccaagtggctagcatgaaattcgaacgtatcaccctttttatcaataacatcccgctcaggttccatttcatgtagccccgagattaagtctggaattcttagcttatgtggtgccttgaactccactgcataagcagggattcgtcgctcatcagaggcaacatgcacgcaaaactgatccgcactccgattccgtcgtcttccttcaagtcgaaactctcggcgaagagtatggtcctgtagcagagcatcaaggatatcattcacaaacctttccatagtatccctttgaaagtcatgtaaggatgcctcggaaaagatcgtatgcctccgcgtgtgcttgtggatctcgtcaaggaagtaattgttccgaaagcggcgcttgcgagtgaacgtacgatcacgatttaacctatcccatatcttctcttgtacttcaggaaactcattccagtgccggatacgcctggggaacaacctattaactggattggtggtatcttccggtatcaacgtcacatttgttgtgacacggattgcctgggagagcttgtggcagccatttagcaatccagataatgaattcagctcagcttgacgctctgtatctttctggtgtaactctagtttcttctggcgtagctgtgcttcctctcgaagctgctgcgctttcacaagctgacatcgtaattttgcaatttccccgaccatggcggctgcaaatcacctgttgcagggagctcaaatgaaatctgtcaccgaccttaatcaagataatgggctgacgaacgtgtaggtctgtccttataatagcgtctgtagaagacattgcgggatacgtgacatcatcacacgcagatctgcattccagaatagattgaatatatgatctacataccaccggattacctactgaggcggacgcggagactcagtcaactatagtcgagattgtggtagagtctaccaaccccttgagtctcggcattttactataaataaattatcggcagatttctctcggccccacgcccgcaccgccgctcgaaagagacaagagaaatcgagtatattgctgtgatcttattattctaggagaacgtgttaacacgttaatatatctactggctggcatgtcagatctaggagccggtatgtcagatctactaactggtatgtaggggcctggcccctagaatactaccgacgccatccaacgccatgggatagggcccctaaattcttcggttagagaatagtctatactttatttatacagctagaaaattgtagctattttgaagcggtcgtaggtcgccacacagctactatgtcgaaccccgtgaggtaaatcccgttgatcgtgggtcacgttgtcttactctgcattcctactctatcagctggtgcagccgatagaagaatagaaaaaacgtctaatttaaccaactttagtaacttatctgcctaatgcatatgtaatggaggggatacgtaagcatcaccccactacaacacatacgcatttttgtaacacaattgctcatgagagctgcttagtatactaaactgccattgatgaccctagaacagccccggataggggctgtattcgggtatgattcatttctctctctctataaattatcttcaccgcggctagttagtttctaggcggtaagactatttcttctaaaatccagattcagtgtctcaataaaaacagttactgatcttagcagactactagggaaattgaaacggtctttccaaaggaaaaaattaaagccgaaaccttgaagactagataagatgtagcgagagtaaagcatgattctaatctaatttcgctctatgattacttaccacccacatcacgtgttctgtactattccggattccaagtagccctatctctgacaggtggacttgataagaacagtaacagagcatcggatctggaaaccgcttggtgccggtacaagggctagagcagaggagctttgtcaagcttgatagtccggggaaatccttccgccattccgtggatgaccgcatcctatctgacgccacatgtgccctaacgatcttgaaccatggaaagtggcaactcctcccagtacaatcatcggaagtacgggcaggtgctacccgagagacggtgctaatgcaaatccaggaatggctatatcagatcaccagctataacaaaagcctcacggagctttggacttccgagcagtatggcggtggcgtgaacctgagacagacaataaaggatggatcatcctgctttgtcgggtataattatctctgcatctatctcggttgacttatccgactggaataacgctcgatatacaaagagagtatcttaccgctccgtcgaggcgatagtatccaaacagattgtacggagttcgccgaatctaaccccagatgaactcttggaaagaattaggtttgtctcgcaccttgattgtcgcagggatgagccagagtggatgaaggcgcattggccttgttttaatataacctctgcgatgaatatactttccagggaggaaggactgggtatcaaggggcgaattggaaagtagattagcttagtgcatctatgacgctaatggcaaagttgatgtgccactcgtgcagtgttacggtctggcttttggccagcaaaggagcgtgaaggaactagtatgacactgggaatgcagtactctatggagggaaagtgtaatagccctggcaaggggggcatgttggacttcacgttccatattccttgtagtaatttgtctttcgaatatacaaacctatctcaccatcacagagtatggttgttcgtggatgaattatacggaagatgagcatgtcttgggaaggaaattagttgtagtaagagctatatgaaggagtagacttggagacaaagaacggctaagacaaattaacaaataagcgatccacgaactataaaacctcacgtaagacagaatatatccgtgctgaccgatatgtactttaggaattagcgatataaacaatgggactggccatcacctggaaaacagaaatatattcagaggctttgtcaaaccagagctcaaaatgtacccccacgctgattcagcgctctcacaaactggcgcagctgaaccaattattatgcgtcaatatatgaggcggccaagtctcaaagaaaaggatacgacgctgattcagtgccgtgcataagagtgaaccaaccatggccaatcgaccaacaggatactggaatctgattgcgacgaatccgcctcgagaaaatggatggtttctctgagagcgcaatctgacaaacgggagtatccctttcattattaaagtcatcgtgtataatcatcatgtccgcttccaaccaaattgtaacaatggacggatctacggaatgtcgtatcggatgtgttccacatccatccccttcatcaactgcgggtatttatcgatgaagaccgatgttaacccccagccactccggtccatgaaggtctgaaagaattcaggcttcacaaacatgttgttgttgtcatcccagtcccaaatactctgggacgacggccaccgcactctacaggcgctgatggcatatctatagagttctataatatcgatggtattccaattctccagcacgttcagccgtagttgtggccacaggaagaaaaccaaatcagcatgttgatcctgccgtacttgccccgccacaggttgtatgaaatttggcatgttggcatatgcaagaggggaagggttggcccgccatttaacaaaagaatacatgatccagctgtatgctaaacggtcgggctctcggaggctcatccgtctaagcaatcggttgatctggtctgctagccagttacgcctggagccatgtagcagctcaaagggagtcgatagaagtggtagcttggcgatggcctctgacaccgctagccacccatcccaacgagtattagcggtgatatgggtatactccttaggggtcatcaacgggcacgtgtctgggccgggggtggggtgcatatcgggcaccaggccaagctcaataattggtgagggtgggctttgagtgcctgaccccacgggccacgtgctaggcatcgatgtagctgtgagaccatcggtagttgacccgagatgtggaaattctataccattgccggaccagccagacatagtgtgcatctcgggatcgaccaagactgtctcactgcccgggctacaaatcggtgtcgtcggtgctggtagagggtcggaggccatatacgttgaagaaagtgctagacgtgcccccgccgcgccattgccctgggcctcccagccctggaagagacgacgaaggtgttcttgtcgagctagaagaagctcattttcccgtctaacagtctccacggtgagcatacaattgtgaatcaattcgttgccatgattcttctcgcaataggacacccgctcctctaaagctcgcatgcggttctcccgtttctctcgcaggttctgttgagcgcgtctatcgcgcaagcgtttcctttcagacgaggttgccgatgcattgtggcgcgtggaggacattgttaattggcctatatattgacctgtcaggaggtagagtagaagaaagagaaagggagacagtcgtaccgggaggttggacgaacgaacgggggggtgacccgaataaagaagggttgcggagtcgtgacccgctccatggtccattggattctcgccccatgatccagactcgatctaatcttcaagtagttaacatgacggggtggccatcgctctcgttggatcccccagacaatgaactcgcccaaaacggttatcacttcgcatggatccttagggcactttgcccgtttgggcatgacagggccactaagcccgatcgggcaacagctggcccagactggacggaagactctggatccggggaacaatgaaagttgagggaactgaaaaagaattacgctcgggccctgtttcgaatcagcagcctttcttccgggtcggcgtcgctaacctccgacgggccgacattgtccgcccgactgcggaaatcatcggcgattccgactctccagcccgatgtatatagccacactgcactgcccttgtcgtaaatctcgctttcttcggaaactatacgccgacctctactccaaattcagaatggatgcggactatccaactggggacctaacgtcccatgacgcgattctgcctcttacttgttctccacgtctaatcatcgtgaactgagtcataacaaggtcgcgagaaagggtggatttaaatacgagcagtatacgttagggatcttttggtttttttctcagcatgttgtatagacgcacactaaatcaaagaacaattactttcccacaaaatcgcttatttacggaattttaatacttctcatttgacacacctatcatatttgtgactatgacacgcaccgatgttctcatcgtgggagcaggtccaacgggcctcgttctagctctgtggttaactcgccaaggaatcagcgtgcgcattatcgtcaagtcagaagcaaaggcatcaacgtcacgagcgatggcaattcacgcccgcacgctcgaattatatcgccagctcgacctcgccgaggatgtggtcgcaaacggccataagatcgcagcgaccaatatatgggccggtggagtgcaccgctcccatgtgccgtttggtgattttggcgccggtctgacgccctaccccttcatacatatcttcccccaagatcagcatgaacgattgttagaggcgcggttgaatacaatgggggtgcatgttgagcggaatcgcgagttagccgagttccaagagcaggagtcatccatcacagcgcgactgaggaataccacaaaaccacatatcgagaacagtgatatcgagacttgcgaagcagctttcatcgtgggttgcgacggcgctcattctgctgtccgccagaactgcagaatcgggttcgaaggagctacatactcaaagttgttctatgtagccgatattgaaggcagcggacccagtcttaacggtcaagcgcacttgagtctcaacgataatcaatttttcttgctcatggcgtacgacaaagaccgtcgtgcacgactaaacggtgccgtcgacgaaggcgcactgacgaaagatatttccgacctcacactcgacgacgttgcgccggacgccggcaaggccgtgggcgtcaagatcgacaaggtgaactggttcagcacctaccacgttcaccacagggtagctgaagcctttcgcagcggacgggccttccttgtgggggacgcggcgcacattcacagtccggtcggaggacagggaatgaacaccggtatcggcgatgccattaacctggcctggaagcttaccgcagttattcaagacaaagccgacatgtctctcctggatagctacgaagtcgaacgtcgtgcgttcgcggcacttctggtcaacacaaccgatactgcatttaacgctattgcctcagaggggtacctgtcctattttatccggacatggttcattccttacgtgtctcctattctgtccaagattggtctcgtgcgacaaaggatgttccgtggtgtatcccagattatgctcaattatagggatagtgcgctgtcggctggcttggccggtacggtccaaggaggcgaccgtatcccttgggctcccgtgggcgaacttgataattttcaaagctttggggagatcacatggcaggtccacgtgtatggcgaagctaaagacgagttgaaagagtggtgtcgttctaagggaattcctctacacatctttacttggaatgagaaatatcaatcggtcggcttgggaaaagatgcagcatacttgctccggccggatacatatgttgcagtggcggagccctctggccgaccagaacgatacgatcaatatttcaaagacaacaagatccgactgtgagaacacttctgctacatcagtttcatgtttttcatagattcgagtccctcagttctgtgtatttccatttgtatgaaaagcggccttggagtttcggttttggattcacattggtattttctgttgatatatagctagatgatactctctattctacaaacgagaatacacatcaacgtcccttatatcattagtctctcctacgcgacgggcatcttcctccgcataagcctttctccatacttcctgtacctaaacttggtgtcagcagcactgcagctagagtccagatctgtaaacctacatcgtagtgatatagccaatgatggtcatcagtccatttgctctggatattagccatcacaatctcatcaaaggagtttagacccttgattgaagtatcagctctccggaagccatccagaatatcgtactgcggtaattagtagaccgataagaaatcaggcgttagcacataccatatccttgtaatgtggtgatcgaactctgtcatatagagtcaaagcatcactgagtggaaagtcacgctcatgtgcccattgcactgctcgagcgagcacatacacgtcttccaatgcgaatcccgctccagcgccttgagggtgttagaatactgtgtgtccaagtggtaggtggttgaaaacataccaaaagctccggataatgctattgtccaacggtgagctaccactagaacaatgaaacaacacattcacttacgatgagacgcatccccgattaatgcaatagaaccatgcgatatgaccttcgacagacgcggccctgcgaagagggggaatttcttcacttccccgattttactaagaacctcttgaatgattggcgcaaattcctatgttcaagttcagtatacatcgagttacgtagaatcgctcgaacaatactgaccttatacagccctataaattcatccggactagcatcctgcccccaactgaccgtttcgctagtctctggaaggtccgttcttgccgtaacctcgtatatacctctattgagattacatgtataaacccacctagtcggcccatgccagaaggtcacggcgtccggaaagttgggaatactcaaaatatcgtccgcgttaactagggcccggaaggctgttgtaccagtatagctgatgcgatggtccgggaaggagaattggcggacaaccttgtacacttaggtttgcgacaaatctaagaataaccgtgataaaacttaccgatcgaacaccgtcagctcctattaggagatctacttcatccgtgtgttcatcctcaaatcgcaatgataatgttttgttcggcaattcacggatctcaacaagacgactcgaaagtcgcagatttgttttatccacggctttcagaagcgcttgttgaagtacagtgcgtaaggccctggcatgcttatgtcgcggcggagtgtcgtgttgtccgctagattgtagtaattctcccgttcgcccattgctgatttcggttactttcatccaaacgcaaggaagagatcaaccaaccgatgctgcacggaatggccatctgcggcgctaaagatggtactcggatcgatattatcataaacacccaaggcgtctagcatgcgccaggtgttccgttgaatacttatacccgcaccgacctcacgtaactctcgagcttgttcgtagattcgaagatcgacaaagggaagcttctgaaattcaatcgctgcacctaagcctgctgggccggcaccgatgattgccactcttagctttggtttgctgcctgcgtttgacatgtttaatgttttttttttttctttttgggacaataaagttactatgtctaacttaaattgaatattcaagacaattgcaggagcaagctgagagaagcgcggagcaagtacgagggccattcaacacaatacatataaattagaaaaccaatggcgtcattttaatgcattgttcctcattctagtgataggtaagtgaggaattcttccgctttttggacccgcacgatagcataagggcttatcaatcgagcaggcagttgagttggacctggcaatgtcagcattgtggaattgccaatatttatgcagataagagttatggcaaatctaagccgcatctggcgtgaatatcatatagtcagcttatattccactagcctggtgacaatattccctgattattttgttgaaatatataagtttctatcttccaacatgttaaccaattatataaatacatgtgactaacacctgttctcttgggtccagccttatgccctcctttcgtaaaaactagtattaaactaagaggccgaagttaaggtgcactaaaatcgtgttgagtctgtagagcagctcgcgtacagatcgtgagtggaactatcggaaccaccgtgcgaagagtggtcctattatattttgtctacagccgacaaaggaaatgatatacacgcccccccacaggacgccttcatccggagttacatgagcaggtgtacacacgcattggagcttcgagcaaatgggcaaacgataccgtcatcccgccagccgtagtagtaatcctttaaattcagagtctatagctacttcttcaacctagcctccagcatcacggtccgcccataggtggaggggtagatcttaacgagttccaagccggcagcctcaaagatttctataaaatcagcctttttcttctcctgaccagtcatacacagaagcgcaaaatccagccaatagaggtcagtattctcatggggttcaaccatgtctgggactaacatatcgcagatcaggaggcgtgaactaggtcccatagccgatgcagtgttcttcacaaactcaatgcaaactgggttgtaaaagtcgtggaggaaacggcgcataaaatagatatgagcatctaagacggttttagttaaaggtcacaataataattcgaggtgcgtactcttgataggctgcggcgtaaaagcgtcgtaggtcataagatcgaagcctgggtagtcctcggggttcatattgttaatgactccaggcagatcctgtaggatgaacttggcatcaaaagcaccgtttatatccttctggatagcaaagcatgattgaccacggccggcaccaatgtcgacgagatatgggcgaccggggtcctgctcaacttcctccttaagagatgcaaatgggaacatcccgacaataggcatcaactggtccaccatgaacatgttggcattccaaacctcgcgacgctctggatccgggtctaactccagcagctcgtaatacgacttgccaaggtgctccttgcccactgagtacacggcgggggatttgaccagatcaaaaatatcgtccgtcttgtgtgactggagatattcaggtaggtggatccaggcgcgggtaaactccagagcgatcatgaagaaggatcccatacctttcgggttgagagcgcgcgagaggtcattatgagcgtacgtgtctggagcggtctcagtaaagattccatgattgatggcgacgcggtagatgcggtgaatgaccgtgcttgcgacattggtgacccgggcaagctcgtcggcggtaatagcactaccatcctcaggcatagcatggtaggcccgaatacctaggatggtgtgaacggcgccgccgagagcgaggaattcgatcgagcgagtcaccagatcaataggctcctgcagggcaatgcggacacgctcggtttgcttcacaacagcctggtggttgatcgggccgtcctcgtaggactcaagatcggccacgagctttctcgcctcctccagagccttgcgaactttggggtgaaccatggtggatgtgcggcttcaaggctaaaagaatgtacagtatattcgactaggagagcagcaggttcgggggacaaatgtatgactcgactcggaatctgtcagcatctatagaacctatgtaagaggggtaaaagcgggggtgcgaaaatggcaggagcgctaattcatagcatattctgatcaatctacatcatcaggccacgtagtctgcataattctgtcggtcttatcagttctactggcattaagtagggactcagcatacgttgcggtggccttgggaattgctggaaaaacttaatttctctctaggcgggcttgggccgcttggccacgtttttgctaaatatattggcccgtggcaatatagactactccatttatttaagtctatatatattattctaaacggaagcacgcggtggtactgcactttcaccgtggggatatccagtttgcaaataatttgagtttgtttcacgctcgaggggggttcaaggattcatctgaaaagcagtacctcaatgctctctcgggtatactacgttcgaggtttttccactaacggttagcgtttcacgagtagacgacacctccttcgcctatgacttcgtgaccctgaatatgcgtgggagacccctgctgctcttaaggatagataggacagcacctacaagggtatcgatgctgactctgtagtatacgcacaaaagccgcaacaccgggagtcgaattcgggaatttaactcaaagtgtggaatataaagtgcactgttcgggaaacattcgattttctgaatggcgcctagagatatgtcttgcaattagtacaagaaggcccttagttatacctggttaaatatatcagtggaaccaaagtacttcccattcggcatgctgtgacttggaagcgtacttggaaaaaaagctcgtgtccggaaatatgcaacacaattcatcttctggcagcaaacggagccatgatctcaaatgttggggcatggttctaggttaatggctcccacagccagtgatagtttctctatttgcgtacctagggcttcgtcattgtcgctccctccattgaaagcggccaatctcatgactttgagactgttctttacgctgaatagcttcgatctctcaccaccactgcaatataccatcatcatcataatcaccatttccagtacactcttggaagggccaacagcgatgatagaggcactgatatcgaacaggcaacaaagcggtccctactactcatcaccaaagttacgctgctgcatatcatatattagtaaccagggctgtaacaacaatagttaattgagaaaaaaaaacatacaacaggaggaattcgctggtggtcacccacccaactactaacctcccggcgtgtggcttaagtacggctgagcggacgggaagccctgttctccacaccctatggtcgtatgtggttgttctttatctgtagaaaaagatatacaaatcctgacactttcagttcctcaaaaatgctcgttgagtgacaacgggccaatgagagaaacaaaagaaagaaatagtatgtacccaaccgagggatgggtaggatagtacccttcaacttatttgaacagattggtcatcttgaatctgacccacgctcaaaggcaggtctaaaaagacgccgcactagtcggatattccacctcaaggaccaggattgactagctcccatgacctatcacgaaaagtgttatggcggctcaccgaggcggcagaataccgacgacaggccaaggtataaataaccaacttcagtctagtagagaataaatactaggggtgatacatctagcggagagatggaagagagtagtagtgttttagcaagcagcagcacctaatttcatcatagaacttacagggaccagttactactgcgactgggttgatagctgttgagggattcatttttatctatgagatgtctatgtcaggtagctatatccacggagaattgtaaactaaccatgtctcttgtcgttcgtgtagtttcactttaacgtttctgtattgtatgtgtgtcttgatattataggaaaatatcgcaagtacgtaggtaattattcatggtgtctcaactttcgcctgtcgacactttggacttcactattccattgtaaaatacgctcaacacaaagttcatggtgtttgggttcctcaactggctcgtcgtctgggctatcaaacgggtcgataatccatggatgcttttggacttgacgaacagactcaatatccctttgaccatcatcgagccagataccatcatcgtagcttctatgccaattgaataagcgtgaagtcgcatatcccgattgctcattagcaatatattgttcgggataggttaaccttgattgtcagtaaacattgacagtaatcagttctttattagacttactcatttatatgacctgtagcacaagagtaacatatactggaaacatcaacaaggctaacgtaatgctctgcgcttgccgggactctttctcctaaatccaagatccagtacaatctccagaaaataggtctgtgtatatgagcaagatgcgctcttacgtccaggctgagattttcgacgggtgttgtgccgaatggaggtgctgtcgaccatagaactgataattctggtcggcaaaagtatgaagtctgaaactcaagtgccctagaagtaatagattcctctggcctatgtacaggataagctatttaaagaaaggattgggccgtgtttgtacagaaggcggcaaccagacatatgggcggtagactatagagagccatattcagaaacaaggttacctggtcgttgcacactacagctgcctataagagactcaaataaggttttatattggtgactgcagaaagaagttgacaattatcaatcttatccactgtcgagagagctttcttaacacctaaagatacagcaccaacgaggttacatggaacgcgtgggtcgaaaaaaatactacagagcagagaattcagagcatcctgtatagagctaagcgatatgcaactgtcgattgattagaataatttaagaaaagctgtgtcttttcgttttggtaaagagcacataggagctgctgaaatcattatagcagaagcaaatttgggtggaggcgcgtgccgtgaggtcaaaattaaaacagctgcaaaaccagtgataaattccccttctagaccctccaatagacagaaatctagaagaatatcgaacgcaagggacgaatttgatataactggtttcagatcacctcttcacagacttattagctttcaacgaccaaagatgatttggaatgaaggccataccgcttgtttgtgctaccctctcttctaaccatccatggcgaatagaaaacacctttgaatttttctacccgagctacccaacagccctgggtgacgatgtcccaaaaagagtcttctatctgcatgccaagctggtgcaagatctggctttcctcacctgcctgtttaagtatctccacccagcggcaggaaatgatgtatgaccaggccagaacaatgtttgtgaagtacccagaacgaagaggcttgacgcaaacaggaatagcggcttcaagcttagtctcagtcttggtcctgtactttacaggcgctggagatccaaggcactggagataatcagttgacttttgaggttgatcacagtttgagtcttctgtcgttttaacctgtagggaagacttcaaaacaagaaaggattttggtctacctgaaatgttcgcagctcctggggggcagtgatagaatggagggatattttcaaaaagacctaaaaacgcagataaatagtactggaaagactctgtgccttccaggtgcgtaagagccgcattttcccagtcgtctgtctttgactgacagcaatggttaaactctgctgttgtaggacagactccatcaccaggggaccaagtaatatcatattcactgctgcattcatcattatcatctaactggggtgtatatccagtgcctgaaagacccgagtctccggtgcccataacggccacattggataactgtgctgtggaagtagcggtcctcttaggtagtagtaggtaagcgaagggatgatggattagaaaggaagatacgtgatacatacaagttgatatagggcggtgacagaggcggtagcagagacgtgaagaaaaggtaggttgtttcaatgatgtgatataacgaagttggctttacccaagtttaagatataaatgttatctaatcgctacaatggacaatcttcagtcttcccggcaaagtatcatgcgtgtcaatcgccagcgtgaaccctccacaacccgtagtcgccgaccacctctttcgtgtgcaccatgcagacggcggaaggtgaaatgcgaccgccgtcagccttgcaatcaatgcatcagccataatatggctgacttgtgttattatcaggacaaggaacgcagccgagtgtcgtcgcatcttccgcctcggccagtttcacatatctcaaattcacccctatcacaaagtaatcccctgacagctgctacaaattccgactccgggaggaaagttaccacgtccccagactgtgttgcctctggctcagcggactcgcgaacaagaacaattcaatcgcttacgcattcctcctttcgtggatcgtcgggtgtcactgctaacgtccttacagttttcccgacctcaaggcacacttagaggaataccatcgcgtcaagaaacagcaaacccagtccactttcacggagtatctagccatgaaacgcgtgtgcaaatgaccgcaagatatcacactaagattcatcccaccttatacccgcctctattggagacattaattccagatgatcgcacagtagccgatcagcttgttgagttatacttttcgacgttcgagacgacattccgaatcttacatgtccctcgatttcttgaggagtacaatgatcattggcaccctgataaccatggaccaatgagtacgggctgcggtgacatctttgcggcaaaactactaagcttgatgacatgtgctacttgcctggtagatacagcggtctcgggcgaagactcccagtcattaaatgagaaggccaaaagctggattcaagccgtagtgtcatgggtcaagaccctcacgagccacgcaagactcactctagacgtcattcaggtcaaacatttattgttattggcgaggcaagctgttgggcatgagggagactttgcttggctggctgccggctcgttagtgcgtgaggccatcactattggccttcatcgagatccttcgcatttcaaaggactgtcgccctattggggcgaaattcgcaggcggctctggctaaccatcattgaactggacctccaagccgccctgggaacgggggcaccggtgacgctgtccgaggatgagtatgactgcgccccgccatctaacatcgacgacgaagacctgttggtggactctcccgttgcccctacccccaagccaatcaccgttctaactagaacagccttccaggtcagtttggcccaaactattggggtccggattaacatcaccaaggcggttaatcgtgtgcgcttgacattaagctatcaacgaattctggacctcagcgagatgcttactagcgaaaggtcaccggcacttatcggagatgccagctgtgaggatgatagccgccgctgccggttggcctttcgccaatccctctttctctttctgatatcccaatgcctcctgactctgcatcgagccttctttctgagtcttgccgagacacgcaaggaaacatatgctttttcccgtcagatgtgtgtccaagctagcctggctttgttggctcccctggagatttccgcagacgatttagaccatggcccggacaacgaacaaagaacagtgtatccgtatcttttgcggctgcggggtggcatgtttcgtgacgaattctttcacgcggccgcaacgctttgttttgagctgcagctgcaggcgaaagacaaaccattacttcccttgcccggttccgtacagggtttcgtggataaaaccacctcctatcaacggacagcattgttccacaatgtggagaatgctattcgatattttgaattgaaagttcggcaggacaagcaggcttgcaaagcatttatgcttctgaacatggtcttgaactcagctcagagccaaatgccgtcctctaactctgaacattgtgcaagtagcggtacacattcggagagctttgacccaaacgacgcctgtccacgagcagcccggcgatgccgagagctgctactagctgatggaggactcttatatctacaggaagctgagggatggctatcgtcgtcgggagggtttccttctatagtttatccagccagcactcccattgactagttccgtgcatgctgaccggcctgctgtagaatcaagaagaccttgaccagcaccaaacctcgtcccggacgacgcgcactcgatctatagtgacgactgaagtgaccagtcaggatgcgcccacgacggattccattcctgatctttcggtaagtcattcctggtaatctgttcatgttactcaactaacctgccccctgacaggacgagctaccatttgattgggatatatttctagatcctatggctatctaccccacgaatgaggtttggccggtggccgatccgttgctttagggtttgagaatgagcaagggctactatgttaccattgtcatccgtttaactatttccctatagaagccaacttcatagatcagtggtgtgttattcggtggtcttttgcgtgcacatagcaattaatgtgagatataattctactgtcaactggcagtagatcattcaataaaggtatagctattacactccactgtagtttttattctggctaaacttttacgccttttattttctcttattatcagggaagctttcgtctactgtgctaaggtgcgaaaagaatatccctgggtttattcaatgactaaaattctgccggttttatcttcatcgattgaaaattggataatacggagtactctgtccctttaactatgatgatatgacaatatccctattcgtcccactaacatcactacatattttcacaccttaccacacccggcaatcaagatatccgaaccatatttcggagattcgccatatggcgtcggcaaaacattaaggatattataaggttagcggatgagatccactcggtccagatccgaggctagatcctgaccttgccggaatacgcatctccggtagcgctgtccgagagtccgacgggtcgttcaaccgatcgcccgtctgttaggagactttgaacacgaatatttgcgtgatggtatttttgatacggttgtgttagtgctcttggcgttttgtgaggatacttgtgttgagttggtgtgcacggggttgatatatataattgctgcatattaattcaagggatagagattagggcatggcacattgagaatgtctagagtaataagggttgctgtaggacacagaacgtgtgcaggcggtgtaagaaaacagagaaattggattgttctatctagcaaagcacatagaaaccatgatagatttggcatcccgattacatttacaaccccgacgtatcatttaatacatactaaggtagaatcacaaacaaacatcacgaactattcaatgacaggcctttccatacttcttcagacgatggtaattgtacggcaacggagcaagataaccagcagtcatcgacaccgcagccgccatccagaatttagggtctcctagcgccaccacgcccccagtgaaatgataatcaacgatattctcagccgcttccattgccaccatcgagaccatactcatacccatcgctgtgcgcgctgccattggccaggagagctggtcaacgccccgccgaagaagtatggtctcaagaatgatcgatgtagtcataccagacgccactgagtagaccaggtgttagaatgcaattgtctttggtcgtgcagaggataagacgacttactagatgcggccatgattgtgcccatcccaagcgcgggatagtaagtttgcagcatccacagagcggagaagtcaccaagggtgcagccaacaaggcaccgcagtgtattgatcccggctcgcttccatgttgaccggcagttccagaattttatgtgccacattgatagtgctggcttaatcgtcgttgtagtagagacatccctcgttgaagcctgacaacgagacttttcttttgcttggttggaatggcaggcttgggctggcgagaagctcgaaaagtattgcagtggtcgggaagcaggcaataaaacgtgacctgtttgacaccaggttcgaagaatttgacagtttctttgcatgattaagacggattgttgggcggcgtgatatacttagaagggcagtggttatattcggctatttgtaagatgtcgatcttcgctccggggaacaaactacgcgaaaaacgcgcagagaacgacccacagccagttctacagggccatagacttagcttggagaagactccgccggttttcggagggacgaagggatgccaacggctcgagctctgggcacaaatacctcaccggatagaggtatttcttggcctataagtagagagattattcttcatccattcaccaggtcaggtcccgagcactaactcctgcgtttcaacatacatttccctgtgaccaattcccttttaactcttctctcaagttccaagacagccatcatacacaatgtccgatcatcagtacaagttcaacgtcaaaatgggatgttccggctgttccaatgccatccagaaggctctcggaccactgagcggtaagtgactaccaatacaaccccatggtgttattgtacgtagcgtagataattttatcctgttatgcgtcatactgatagagtgagacgttcgacaggcctcaagtcccttgatatcagccttgaacagcaaactgtttccgtcgtcgccgaaccctcgctttcattcgatgccgtgctcgcagccatcaagggaaagggcaaagatgttcacagtggcgaaatcgatggagttcctcagcctatctaggtcaagcttgggcacccaccggatgaagtcttgcaaggagagagcacaaaaaacggttggacacatagtggatagcgaatggatgacagatattgaataaatgcatagtctcattttgaccaagaattgtctgagcgtgtaaagacaacgtgtgcgcgaagatctcgtatttctgtcccaagacacaccacttggtgtaggtctcgtgtgtaggaaagaatattagaccatcacgtacaacacgataaccaattagtgactgtccaaaatccaaggattatctcggagctctcactattagtggatcattttgacttcgcgcacaaaaggcgcatccgcccctcggggatgagggccaaccatggttctcacctccgatccttgaaccaaacttccgcagcagatctagaatgatgcgcgattactgcgttagcgcactgaaatttgtcgtaccaactagaacctgccctggatttgcaatcagttcttccgctgacttcgaaaccccagaaatccaggtatataagagcctacgcccatcgctttaccggatcatactcattgctcacaacccgtcgactcattcaaaatggtcacagataatcagccatcgccgcctcaatcgaggctcaccaccatcttggtgaacaatcttcattgtccttcgtgtgtgaccaatgttgaagagactttgtcggctctcacaccctcccccttttccatctcgacctctatcttgtcccatgaaatcaaagtcgtacaccccattaccctcagcagctcccggatcgtacgcgccctcgaagaggttgcctttgaaattgacagtgtcattgcccatgactcggatgaaagcgatattgaagcccagcaaccccgaacccatcgccccgcgtctggaaagcatgatgttcattcccaatccaaaatacatattcaaaagtgcaatgaatgtgctacacagctcgcgtcatcaacatccaatagtagcgatgacgagggagccatgaaggagatcactgcgactgccgcgtccgtcagctctgcagagaacagcctcacatccgtcatggatgaccgacttaccggtagtcgaacacgcattacactatcaatcagtggaatgtcttgcagctcatgtgtcggaaagattacgggtgctttgcagaaccgaccgtggatcctatcggccgatgtcaatcttctgactagcagtgccgttataatgctcatggacaactcacatattgacgaagtgcttgagattatcagaagctcgggctacactgtggaattgatagacacggaagagctgcaacctcaaaagacatcgaagtcgtccggaatggcagatgcttggcgagcttcctatgtcatcggaggcatgacctgcagctcctgcgtgggcaaagtgactgacactctaaaccacctcgattggattaccaaagtggacgtgagcctggtctcgggcagtgcgaccgtggaattccaagggaaagcacacctcgacgagattgcaggaatcatcaagggtctcggttatacagccactcttagtgacctggagagtagggcaccggccgagcaacgtagctccaaacgatcggtgatgatccaggtggacggaatgcactgtgcacattgccctcagcgcattctggatgctctggatgtatactcagaccggctggatgtgaccgaaccgcctagcaaagctcagcacaggctcacggtaaactatcttcccgatgctcccaactttaccatccggcatatcatccgcacaatcgccgatgtggacaagtcattcactgtttctatctaccatccgcctagtctggaggaacgttcgcaggcaatgcatcgtcgacatcagtggcaaattgcgcgccgcctagccttatccgtgctcgttgccataccaacattcatcatcgggatcgtgtacatgtccctagtctcaaaagacaaccccggtcgcgagtacctcgaagaacccatgtgggcgggtcaggtctcacgcattgaatgggcgttgtttatcctagcgactcccgtctacttcttcgccgccgacctgttccaccgccgtatgatcaccgagctcagggccttatggagaccgggcagcaagactccgattttgcggcggctctaccgttttggaagtatggatatgctcatgtcactgggaacgtcgattgcctacttctcgtccatcgctatattggcaatcgatgccacagagccaaggaacggccacaaggcgtccagtgccggaacgtttttcgactcagtggtgttcctaacgatgtttcttttgatcggccgattgctagaggcttatagcaaagctaaggcaggagacgccgtgggtctccttggcaagctgcgccccaaggaagctatcctagttgagaggaatggggagggctcaacgacctctcgcgcggttccagccgatcagctagaattcggggacgtagtgcgtgtagcgaatggtgcctccccgccgtatgacggaactgtagtggaaggggaatctcagtttgacgaatccagtttgaccggagaatctcgaccggtcaccaaatcgattggagatgacgtcttctcaggcactatcaaccaggcacgcccagtctcggtgcgtatcacagggctttctggaaattcaatgttggatcagattattggcgccgttcgtgaaggacaaattcgccgggcacccattgagcgcacagccgaccaaatcactggagtctttgtgccgattattacgctgattgctattctggactggatcatatggctggctcttggcctctcaggccgattgcctgagtcatggatgaatggcaatcccggaggctgggagttctggtcgttgcagttcgctatatcggtgttcgttgtcgcttgcccctgtggaattggccttgctgctccaacagcgctgtttgttggtggtggactcgccgcccaaaatggtattttggtcaagggaggtggcgaagcgttccaggaagctagccaactcgattgtatcgtcttcgacaagacgggtactataactgaggggggtgaaccggctatcactgatcatgaaatagccaacagtgaggatgtcgacaaagtctggggtgcggtcttagatctggaaaagaatagtagtcacccaatcgctaaggcgatggtgtcttttgccaactcccaacaaccaccggccctgaaagctaccactgtggacgagataccaggaaaaggcatgaaaggttctttcttcccacagggccaagatggacctgcgctggaggtcattataggcaatgaagccttgataaaggatcataaggtggcaataagcccgaccaatgatgaaatgttgactacctggaagcgccaggcgaaatcggtcgttctagtcggcaccagaatctgttcgacaccaggaccaacggagcacattccttggaagctctcgttgatgctggcagtatctgaccccattcgacgagaggcgaagggcaccctccaagccttgcgaaatcgaggcgttgcggtctggatgctttccggagacaatccgacgactgctcacgcagtgggagagatggtgggcatccctccagacaacattattgctggtgtgctgcccgagcaaaaggccgaaaaagtacaatatctgcaaaaaactctacagaagccacctcgatcgagttggttcagacggggcaaggagccccagtccggccgcgcgatcgtcgctatggttggtgatggaattaatgactcacctgctttgacggtggctgatgtgggcatcgccatcggatctggctcggatatcgccatctcgtccgccgagtttgtcctggtctcctctggtcttacctctctcctcaccctgatcgacctcagccgcctcgtatttcgacggatcaagttcaactttggctgggctttggtgtataactgtgttgccgttccagtcgccgctggtgtgttctatcccattgtgagcaatggcacccatgtacggctggatcccatctgggccagtcttgcaatggcgttgagcagtgttagcgttatctgcagtagtcttctcatgaggacccgacttccattggttggtttcagagctaagaaataatacgtttgaagatatggaatacctcggtgtatcaaggattatatagattgcctttgtcatgtcgcatcgtatagttagctttttagtacttttttttggttatgttttcttatgcccatttctacatgttttgtcataaataatctaccttaatatgtctcattataaaagagtgttacatctgctgttactccccagaaaatttaaacaatgtatctcttcttcgaacattgcgttcataatgttatgggtcaattctgccctgtttaagtaacatcttccccggtagatgtaaatgtaaactttcaatctttcgcctagtccatcctagtatccttaaatatacggaagacctgtgtgacccctccggtcaaatcgatgtctgtcaaggtcacagtgcccggtgtatctgtttcgatttccaagttccatgctatagcatttggttgcaagtggcaatgtgtacgaggtcgcgtcggggttgccaacttcctaatgaggaaatctttctctccgacggcaatccacactgtggaactggtcaactcgggctggtattgtagtcgtcaaggacccacgggacttatggaatagtgctaggcggggtatgaagggctggtaagtgaagtcagcacaggacgttgtctatctcgtactcttttcattatcactctacctggaataattactaaacaattatcatcatgtcttgtaactgtacaacaattatgctcagtgacggcaaagcatcaccttctgtcgagtccgtggagtatctcttcgacctgggagcattttcgcgcaagatcaccacctccagtcccgcctctcaagtctggttcaatcggggtctgacttgggtgtatgcgttcaatcacatggaaggtgttaaatgcttccaaaaggccatcgcgtatgaccctaagtgtgccatggcctattggggcatcgcatacgctctaggtgccaattaaaaccacccgtgggatctattcgatgaagggaatctcgcggtcactctaccggcaacctatcaggccgtccagactgccaagtcgtcgctcgctgccttcgccaccccagttgaacagggcctgatcaatgctattagcgtccgctttctgaccaaacaggttgtatccgtttcggagctcgttacccacagtcgagaatataagtatgcaatggaaggcatatatagggactttggtgacgatctggatgttgtcacgctctacgcagactccatgatgagtttgacgccgtggagactctatgatgtggccacgggccagcctaccaagggggcattcaccctggagagcaaggatgttcttgagcgaggactgcagctcgaagattccctgaaacacccggggcttctgcacctgtatatccatttgtcagagatgtctcccaatccggagcgcgccctctccgtggccgagcatctgcgcgatcttgttccagatgcaggccacacccaccacatgccgactcaccttgatgtcctagtcggtgattacaggcgagcaatttcatcaaacatccacgccactctggccgatgagaaatacgttgcggtagaggggcctaacaacttatacagtctgtatcggttgcacaactaccactccctcatctacgcagccatgcatgccggtaagaaatagatcgccttggagactgcggatcgcatggaaagaacaattcctgccaaggtgctgcgttccaaatccccaaacctagcagattggttagaagggttcgttgcggtgcgtctacacgtcatggtgcgctttggcatgtggtgtgagatcattgctatggctcttcctaaggatcaggggctgtattgcgttaccaccgctactattcattacgccaagggtgtcgtgtatgcagccacgaaccatgtaactgaagcagagcaggaacggaaactatacgtcgccgcgatcgagcgggttcccattacccgccggactcaccctaatcggtccgtcgatattctcaacgtcggtgttgccatgctagatggcgagattgagtatcgtcgaggagagcacgagaaagtcttccaaaccttgcggagggccatcgaactagacgacggcctgaactatgcagagccctggggctggatgcagccggtgcgtcatgcatttgcagccctatcactagagcagggcaatatagaagctgccggtgaagcttacaaggccgatctgtctctcaactccactttgggtcgcgcgcatcaccatcctaataacgtgtaggctcttcaaggttactatgattgtctcgtacgcctcggtcgggatgatgaagccaagttgttggagcctcaggtgaaagtggctcttgcagtagccgatgttctcgtgaagtcgtcgtgtttctgtcgactcaatacatccgattgtccagatgttcgcgtgctgacctcctattgtaaatagattgcagtcagatttgtgcgatttccctcttgtgttttgtgtcccgttgtcttagatcgtgtgccaacagtaactcctttcactatgtatacatacttagttcctagacacgtctgtaacctgtcgcaatcctcattctcagcgttacgcccaaacttgacgcgggccctactatatcctgcatatatagtacattgttacaagctgccacaatcttccggcgtagaagaccaaccctagctcagaaaatagactggaggtgttttagccgtgcaatcaaacctactcgcattcagcgccgcagcactgtaactggcatctcaatgtgtttttggtatcgctgagatgtctggtgagaatggacaagcgctccacctgctggataagtgacttctgaccgatggagctaatataatcgtgaccagctggcctctataccccatccttggccatagtggcggactgttactgggtgtcttcttttatagcctcttgcttttcgagctactcattagcatctttatgcaatctacatgtctctgagtcatgaaggggaatcacaacaccttgatcatggaaaatataaaaatgtggtattgattgaaaatcgaagtggtagcagacttgtgagtccactcgttttggtgtcattaaaattcgctacatacaatgttctagttcaacaatcataagagtccaccatggataaagcaaggcaggtggctccttgttacatcaaagaaacattgactgatctcggttcaaatcccgtatcgcattcatgtcattacatcccaaatcataccaggtactggcgctccagccaagcaagctcgggtctgccagcacaagcagcatcgctattgcaagtaccagaatcatagccggcatagaagtagaagatgttcttcttatccgcaatttgatcagcattgagattggcgggctggttttggaccaaataacccatgtagccgtagaaggccgcatcattatcagcattctgggatgcgtgatccgcaaagaacccagtagtgtggtggtcgctatggtcgccatcaccgagatcattgacaaagtcaagagtgttgattcggtcggggctgaagttttcaatgatgtcggagagaacgtcgagaagttgatccctcgtataggtagtgccggaggcatcgaccgtgccgatttggtcgatagttccctcccagagcttttggagactcacacttcctgtggatgcgaaacctgaaccgtccaggttgccgtctgggatgtgcaagaaggcgagttcaatctgaggcttggctgctagttcgtatactgggatgtcgaatccctcgatgcctgcatcgccttcgttccattcattagcaacacccgcgatttgtgcataagtcgctaaggaaccggcttgacggcttgtccagtaatcctcgccctggcctgcatcgccggctgtgaggaagacggtgcggacggcgcgacctgaccgtacgtcgctaagaaggtctggggacatgaaaagtagatcatcgtcttgatgtgcgacgatgttgagagtttgtgcaaccgtcaaggccgcagggccgaggatagctaaactgctgagaaggctgtatggtttcatgttgaaagtatggaagtatgggcccgtggtgagtgaaacacaacaatagtgagacaagaggtgggcaagaatacaatttatgctcggtatctctttgaaaatgtaaatagaattccattgttggcatgttgtgtagcttcaactatgctgcattccagttgaatctcgtcccctgccgtccacattctggtcaaaacattcaataatagatgattttgtacacagactgcaaattagataacatttctcgaactactaggcttccgacaagtacgatccatatggccatgccatacaagccaagactttacagaccatgactatcaccatttcttatgctatgtttaatatactctgcgtttgacgtgtacagagcatatggtccagtataagttatccgaagcatttttctctcttgccttgatttgatttgtaggctcagctgaatgtttacatgcctattcctatagtcgatgagatcctgacgttcctgagatggagatgttggcaagaactcccggcgtatcccttgcttcacaaaccctggttcccagtttcaattggcgttgcggaatgtttgacattgtctccaccaacatgtgcaattgaccgagcgacagctagaggtcaagaatttgctatcccatgttaggaagcagttatgctctcctccgtatgcgcgttcatattccggagtgtcattgcctatacgagggtcttctacctcaactctgtttatgtatctctagctcttacccttaaatctattttttttttccatgcccctatactccttgaatctaccaaggctagcattccagggatatgtcatgtgcatggaaagtccaatgattaggtcaacatatttgaatgtcacttccatcggcacctaagggacacaatagcctctgacaacacattgcaaccgaacaaaggctatccactccttgagttaaatgttattgtacatgtccattttccaccaatcgatatgtccgacctgctcaaccttattccaatagagaagtcttcgacttcatatccataagtttcaggagtacatcatccctctccttctgtaaagtattcaaatcagttgcctgcaccatcggctcaaccgttctgcttagatcctggattgcttcaggggtcattgaaaacgtgtgtttatgcatgtcatcatgccatgatttagcagctggaccgagatgttccaagaaatgctgaaagctcccgccgcccgccatagcgttcagagcgtaaggtccattaagcgcccaccgtagaccaagagaagatgtcactgtcgtatcttttggacaaacagttagtcataccgcaattaaaactcccagaaggcaagataaaatcttacctaaatccgccgcagagataatccctctgctcaccaaactatatgcctccatcgatagggcagcctggagcctgttggcgatgaatccgggaatctctttctgaataagtactggcttcttgccaaggcttctgtagaattccatagctcgtggtacaacagtctctctatctgtggttctatgtggcacgacctccaccagaggaatcaaatgtggtgggttgaaagggtgtccgaccagaacccgttcagggtggtgacggcacgccgacgcatattcggacgagggtattccggacgacgaagatgcgattattacctctgggcgtgctttctcgtctaggtaggcgaacagggtgcgtttgaattctagccgttcggggccattcttagtcactgttagtagaataacgccagtatttgagaacggaaatggtacctcttgtatgaagtcaatttcctcgaaatgattatccagtgaatccacaaaggcataattttttagggaggccccttcgctgaggcctatttgagtgagcgttggccattgtgcgtttaaatatgtctcgaggttcttctctgcgttcggggcgggatcggtcaccaggaccttgagccctcgggccaggaataaagctgtccagctggctcctatgacgccggtaccgattatagcgacggttttaatgtccttcattgttgtgattgtcatcttgaaagtaatgtatatcaataatactaaggtataatgtgaagtaattgaattgttgccgtacaagttgtcaagattgtcaagccgggaacaagctttatatattcactctcaaagcatgaaactcggcaacccgatgccgaaaaccagattttttaggatttccatctttcggatgttaatcattcaaagcatagaaaactcccaacaaacggaggcatatacaaggtccacccagctctaccgcgcgcccgagggaaaatggccgacatgccgaggacttgagcgacgagtcccgcgggattcgacccgcagatgcccttttaggttagcggcatccgcggatgcaatgccgagatatcacctacttctagcacaatgctcgttatattgaagatatgtatccaacacagatgttgttggttacggttaatgagtctctaattacattaatagcaagagttttatacaacggtgatgccagtgtaaaagccatccccacgatatataacctcctttccacccccatccatacccactcgatacagactaccccccaagtcagtgacatagacttgctggttgatggaatccaccttcaatccaataggctcatggaactggcgtgccagaatctgcacccgagggctcttctcaccaacgtatgccttattcaatgtattaccagacggatgcgcgccacgatcggtccagtaaagcgtctgcgtctccgactcaaagcccaggtcaacgggttcggaaagacccacgaacaaggtctcaatatctgatcgattgagcgcattcgcactaaaaggcatgtcgatattcgtacggaaaatgcgtcctttgccccctctgttgggacctttctgtgtccagtagaacttcccgttgttgatatccacggctatacccacgcaccaccgtgttgggtcttctatgtcagtagttttgtaatctccgcgtagaatcaggatttcgtgattctggccgtcgaaatcacagcggtgaacactcataccctcgcgatcgcaaaagtagagcttgtgattctgatcgtcgatggttagttgcttgggcgtgtagacggcaccctcgggaatgatggtttttatatcgctcccatcgaaatctgcagacatcaccgacccatcttgaatagatgtaccaaatcccatattagtccaaaacatgcgaccggcggactgcgatatttcaataccgtctggactcctaaggccggatacgagcgcagttacgctcttgccaccatccatgctgtggagaattcgtccattctgaccgaaaaagtccccattagtaatctccgtactctgagctagttctaggaagtagatttcgtggggatagttttgttcttttgtcccggaaggaggtagacctccattgcttgtctgtgtccctggcttccattattcgaagtaattgttgcgaggccgagcagcggttggggttgggtcaggatcttgcattctcacgtaatagtcatcaggcggtagatcctcaaggatgtgagcctcttgagatgattggagttggacgggtgacatgttgattgatgaccttttcctatttccaggagagtcagaaagggctagaggagtcttttgtatgagggggatctggtaatgaagtcttttacaatacttccatgccaaattattagcacatatatcgtgtacgacaaaggttcctttcctgaagcgacttttgacatcatatcggggtcctagattaaacttcaccaaaaccgggcggtgttggcgacacgcaccggggcaggataaatctaaagctatgctcaatgccgttattggtgacctggctcctcttcagagctggatttgagatcaggtcagacacattccaaggtatggtctccccgcgtgccatctatcaagtatatacaaagttctcgtcactggcatgtatccaaagctcaggacatgcaacctatactttcatagtgccaacttgacgccatgatgaggttgcaattaagcaactgggagctactgtaccgcatgtctctcaagtgactggttttgagatgttgcatatgtttcggtgcgccgagagtacgatgatattgtggtaaggctgaacacacatctaggagggcacgactgaactgtcgatttcgcttagactactccatacaagatagcagtggagactcgggctagtgatcggccgaaaggtggatcatgggctttttgggcggatatgccgagtgacttctcctccgctagatagacttgagtacaccggtttaggaagaaaccacgaatagtaagaaaaagacaggacgttctaacaggaaacgcacccttgtatgtaccaccgacaaaagccgagtattgtggttttcgactccaaggaaacaatgcacgacaagcgtcgcagccacagaagcttataaattagctcgggcaaagtctggatatgctccacagtttggattctagcgtcggccgtatgccataccacgaaggccccacagaatagagggcgtatcacattggcccagactccagaccgttacattcattctttcagagtcttcaggaaaatccaagaattaagcctcttggccttgctccacccatcatcatcttcgccttcctgactgacacccaagagaattcttagctaatgccaatactgtagttgggagcatctggagttgagaaattcactatttgatggcccttcgcctctccagctggaggttgttccccttccatgctccgacctaatcctttatcatcgcatgatggcaggtggtttcctcccgtaccacgagcctggaagtaagtacatattcatctctagcgctacacgatcgcaaagctcactgggtcagttgttgaaatcctgattatcatctcattcttcttcttcctgtccttggcggaatgggtctccgccaaagttctccgcgctggaatcattggacagattgcagttggtatcatatatggtgtaccgctcgcaaatattcttgaatcgaactggcaacagactttcctggcactgggatatgttggcctgatcctaattattttcgaaggttggtgacttgcaagttctgcggcgtctgctggtgttgacgtcaatcatctccaggtggccttggcgcccgcctcgatcttttaaaggagaatttggtggtgagcactattggcgctgccacgggggtttgttttcctatcggactttcttatcttttgttatacctgggatatggatatggtattttctagctttctatactgccaacgaaagacgatctaacgtcaatcaggcgcggtcgagacgttcatcatcggagcggcactttccgctacctctttgggtaattcccgtcgccaaaccctaacttggctgagatctaacaaactggctaggtaccacattcgccgtaatctcgtcagcctcgaaaacggtagatctcgctcaaacccgcgtgggctcagtcctcgtgagcgcagccgtcattgacgatgtagttgggcttgtgctttccaggtcagtaacccaaatttaaaaatccgcacatacatacctgacatgaacagcatcatctccgacctaggaaaactctccaacagcgacgccaacctcggctggataataggtcgtcccatcgtagcctccgtcgcaatggccattgtcacgcccatcgtaacaaaatttctcttcgccccgatattccgcaaatacatcgagttccactttgcccgctacgaccatatctccaacatcattttgatgacacttgttctatgcgcatttatctctatcgctgcttacacgggcacatcggtcctctttggtgcattcctcgctgggacatttctatcctacttaccgagcaagcgtccggacggcccattcgtggttatgagtcgtgaagaaggggagcaaaatgaggataaaagtcccacttttgttcataccttcgaggcctatctactcggtgtgcagacgtatctgatggaacctcttttctttgctagtattggattcgctatcccgtttgtgcagctgtggacggggaagcgtatctggaggggtatattgttcacgcttttgatggttgtcgcgaaggtaggtttgttgcgcacgtttactggatggtattgctaactggtatagtttgtcgtgggaacatggatcccagtatggaaacacctgccatggaccaaatccaaagccgacaaaacatctaaggagtcctcctccgcgccggacgtaccaattgaaacccccaaggataatgcgtcaatgttatcagccctattacttggttctgcgatggttgcgcgtggggaaattggtcttttgattattgagattggttacaactccacggagtacgtgagcgaggaaggctttattaccggtgtttgggcgatcttgttgaacacaattatcggtccggttacggtgggtctgttggtgaagttttatgggaaacgaatcgaggagggtgaatggggattgcagaaggactcgagtccatcgcaggagaaggggaatgcgcagagtgctgtatgacatttgtggtgtactacaagtagctaccgtagtcttggggtgagtatagagaatagatacaccagatgtgtttgatatttggacaatggctgaccatggctattgagtcaaaaacaagtatttcttggcgcctatcctatgacaccattacaaaagtaacctaggtattgcgcaatctaattataattgcattgacatagtgctgcttgtctatagagcggagaaagaaactagacccacgcactttgcttgtctcctcattcgtatcgacagtggttactattgaaatggctggcaggcttgaacctgagaccaagggactgcgaactatttgctggagtttctaaggttgaagcatcgccagactttctcagcccgcgtgataattctacgtcggactaatttgcactaaaatacggtaacagcgcatcatgtttgttaagtggggagtgacactgatagatgcagccatgacacagtacaatggtcgggtgagtctagatcagaaaccgagatgagatatgtgctcggcagagatgatgacctcaagtcatttgcgcattgcgcctttagtccgaaggacgtgcttactcgaaggcctttacgattatatgcctagccaagtgggtaggctacgacggtgtatgattgatggtcaaaggttgtatgcatagtagtataataatccaggatcccaacacacgtaatatttgaaattgagagttcttgcttcttagccgccataaaccacatcattacttgtcttcctgtcttccgtcaatttcagcgaggctatcaaaggtgatataacactcggtcgtcgtccttgactaaccagatcaacgatagataggcataacaccctacgaaagatagtctgcatcaacactagaacaaacgcagtctgtggggtaggaaaactaactactcagtcacgccaggtgcatcctcgttcgtcgcgaacgcattcatgaaaggcatcatatgagctaaacatttttgcgcagacaaaaacaacatatccgcagttcggcaggtcgtcatcaacactagcttgagaaaggaccatggccgccaaggaaagtatggcgataagagatgatgctgtaatattcttcatcttggaatggactatcacgacaatagagacttgtttcgaacgaaacacagtagtcttaattgttgaagctttgttgaaacatgatattatgtgacgatctggtaaaagtttgggtttatcattattagctcatttgcttccctgacatggacaaactgtcgcattttagtgacgtactcgtgaagtacatcacggaaacagaggccgtggatatcgtcgattggtggagcgtttgatatagatgatctagtgtcctgtaaagctctggcgataagcgatgccgaacggcttcttaacggatgaagatatctgtagccactaatacttttgaaaacctttgacgtgcgcctccactttttatctcctcaatattaaagatgccagcatcgcagagccctaatactcgagaagtatatcggacctgctagacggaacttcgcaaattggtctcgggctttatgtttcagcctcaagttactgtagacaattttaagcgcatttgtgcagcttgcttttggccaagtgatatctcggtctatatctggcttagcaattcgtcgtgctgttgaattcgaacttaacgatggctttcccaaagctatagatttctcgaagtcaccccctctatcatccaaacctgaccagcagagtagggtgttgatcagtgggaaacatactggatgagtgtgtatggtaagttattgaacgtttattctattcgcaccaattcgctccccttatccattgcatgaataattcagaggttctaattcttccttataggagctcattccatcgcagggtcatatccccaaaaagcgcccatgctacacttgcacttgccaaagcttctagttatctctcatgtctttcgcagtctaggacccgatgccgaaaaagatccactgcccgatagaattctcaggtcttgcatctatagctgttcgttcggcgttgtgaaaattcgagcttactgtcaaggactccgatattgtcaaagctttcattgaaattcgccactattatcacaccacgatcgccgaccttaattttactgctttacaatgaaccatttcaagcgatcgcctattatgccttaatcttattccctcgtatcaatggccaagtggctgcaaaaccaagaaacttcataactttatcggttatccaccattgatattacagctaaggcatcctcacgtcagctttatccagctttaagtttgtgtgaaatgtcagctgaagattcgatcctatctgaacgagccaagccagccttactgaataaaggagcggttcatcgcttccggtaccgtggatctcgaattgatgatgatgattcgatgacatgctcgtatccgtaggggtcaatgccatcatcagccgcatgcggagtatgtagtcgaagtctagatcctcttattgatcatggggctgaggggagctgaaagcgagtttagagataaatgggcattactctgcaatatatcttttgtgattcctggtctaaatttgaacctgttaatcgtgcgcaacagaaatctaatcagtgtgtatagtacaatgttggatattaaccgttgtccaagtaaacggcttattgtttgctgtgatggtacgtctatattgtatcttgttgagttagttggttattaatatctatttctgtaggaacttggcaagactcaacagcagactcgagcaagcctgcttctaacgtgacgcgattcagcagagccttaagcgcaaatgctgtggtcgagagaaatggtcagaaacacgaaattccccagattgtttactatcagaagggtgtaggaactggcttgggagataaatactggggtggtatgtctgagcccttcgctttcctcctcctagaagaagttccgtccttttctttttcagttcttccacatggcctgttagccagtctaatattatctacaggcgtagcaggactaggcctaagcgccaacgtccgcgcagcatacggcttcctagtcgacaactataacgaaggcgacaagatctacttctttggcttctcacgcggcgcatacaccgcacgcgctgtagcaggtctagtctgccaatggggtctactaacacgacgaggaatggacaacttcccaaccgtgtacgaggatttctaccaaaagaaagccgacgattatacgcccgagcagcgacgagcactcggattccgagatcccctcccgcaatttactgtggagatcatcggggtttgggacacggtcgccttccaccagacctggttgggaggatggataggcgagaagctcgagttccggaatacgattctctccgagaatgttcggtatgcgtttcatgcgttggcgctcgatgaggagcgaatggcgtaccagcctacgttgtggaatcttccgaagaagagccacgggcaggaactgttgcaggtttggttctccggggtgcatacggatgttgggggtggaggggatgatcctcgactttcaaatattacgttggcgtggatgatcgcgcagtgtatgaaggatgggcagttgagtttcgatattgatggatatttgtttgatattcctcctcgtccgttggagattggggttaccccgtgggcgacgagtttggggaagacggggaagtggagtttcactcggtctcttgagggggttctgggtggtgtttcgaagcggacacctcttgctgataagcctgtggactcggggatcactaatgagacgatccatgtgtcgattagtgatcggaacttggcgggagctggtaaatggccgtggccgtgttctgcgttgaaggcgcggaaggatccgaatagttggttactgacggatggtagagtcattgttgaatcgccgttattgaagatggaggactatatgaaaggacggattcggactgtgcatgttgatgagcaggattagtttgtatttaatatttcatgtaatcaatgtttggtaatcacattcagagatgcctccgtataagaagggggatataatgtacactcggcagtctataaatagcaatcacttttcgaatcgatcgactctttgctgtgctgaacagtgtagtgataactgtatgtgaatgcaacgacactcccttcgagtagacacgccatgcaaagatattgttcaagaatcatttagattgaagctagtctctgtaactgtcaatccgataacggcttcagtgctccccctgacatcatatatcaagcagtaacaatataaatttctttgagatggatagagtaatggatgagagatctgagaatagttattgaaagcagttcaaaacatgtggggcaggggtgaaatggacagttgaatcgactggtggctattgatagacatgtctagaagagctattgaatccgtcccctgaactggtgtgtagtaattgatggattacaaccccttttgacattattagatagaagaaatggtgaatccgaggccatcataatgaagatatataaatagtaagtggtaataacaattaatatcccagatggcactattcccattagactcggactaagaatagctgccaacccactcactaatgaaaggtcggtctagaagaccagttagtgtccgattagtgccggcgtccctatccgagtttagagtccgtccatggaaccgtgcggatatccatgttagcattgacagagtgatccaggttttgagaacagaatatctatcccaaggacggtgtcagggcgaatctcccgtcaggggttgttcgaattgattcagggacgtacgtgtcgcggagaaatcaaattacaacgctccattccgattggtcacctcagtgccaccgatcaggatatcccctggatctgatggacctaatttggtagaattctatctttggatccaatcagcttgagttcccaagacaagcactgaataggcagccaatccaaagtgccgaggtccatcggacccactgtgagtctagaaccacatcgatttttgcctccatctggtttaattcttctgctgcgtcttttccctctctcttccatcttcatctccttctctctttctacttcatatctcgcttgaacttgggttttttgtcctcaagttcgttctctctttttagtctgactttcctttttttgtttttttgaaaccatcctacagtctttacttcatcgtcaaaatgcaattgacacaccttcttgccttcgccctgtcgctcgctacgtccgaggccgcctacaagggcttcaactacggtgctaccaagtcggatggcagcgtcaagtctcagtccgatttcgaatcggagttctccactgcgaagaatctggttggcacttcgggcttcaccagtgctagattgtacaccatgatcgtgagtgatttgataatcaagcaggaatcggaatactgactatcacgcagcaaggtggcactaccaactcccctatctccgccattcccgctgccattgccgaaaatacatccttgttgctgggtctttgggcctctggtggtggtatggacaacgagttggccgccctcaagtcggccatctcccagtacggtgactccttcgccaaattggtcgtgggtatttccgttggtagtgaagatctctaccgtgcctcgtccgagggtgagaaggtcaatgccggcattggaattggccccgacgacctggtctcgtttatcaaggaggtccggtcgatcatctctggcaccgccctgagcagcgtccccatcggtcacgtcgacacctggaccgcctggactaacggctccaattcggccgtcattgacgccgtcgactggttgggtttcgacggttatccttacttccagagcagcatgtccaattccatctcggacgccaagtcactcttcgacgactctgtggctaagactaaggcggtcgctaagggcaaggaagtttggatcaccgaaaccggctggcccgtcagcggaagcactcagaacctcggcgtcgcttccctcgccaacgcgaagacctactgggacgaggtcggatgccccttgttcgacgagaccaacacctggtggtacatcctccaagacgccaaccccaccactcctaatcccagcttcggtgtggtcggcagcactctgagcaccaccccattgttcgacttgtcttgctctaacagcactcgcccatctgcttccgcttctagctccgctgctggctccgcgactcccgtcggctctgctgttccctctggctccgctgctgtgaacccttcgtcgtccggaatcgtgtctagtgctgttccctctactacccctggcttcaccgtcggcaagggattccgtccgtccaactcctccgctgctgcctactactccagcgcttctgctagcggctcggcctaccctaaattcaccaagaccgctagcggttcctccgctacttccaccaccgctggtagctcttctgactcttcgtcgaccaactctggcaagtcctcttcggaatcttcctcaaccaactctggcgcctctgcttcttcttccatccttgctacgggcggtgccagctccgtctcgggctccgtcttcggtgctctggttgcagtctttgcattcgtggctactttgtaaagaaactcacctatccatgatcccaatcgatagctagatttagaccatggcaattctttcaagtacatacatttatagatacgctcgttatctttgtcaaggacagaaatcctacatatacattcgctgtcaatacttgtctattttggcttccattcttgatgtgtattattagactagattgattagacttcttctgctggttcgaagagtaaacatgaaaatgaacatgaacatgaattcgcattgtctgttatcttgctactttacctatccctcttagttcaactccatgaataatggtacgtttagcaaacaatagatttcatccttttcaatctatctcggttctttcctctttttcctttctttctttttttcctatttttttatttttgtcttccttccgcctaacaatactcaacgggaatccgcaactcaacgataccctcgtccctgccctcgacctcgtcctcgattgctaggagctttctttggcgagccactagtggagcccctaccacccatttgtcccccctgaacatgtcgaggcggggtccggctcgattgggctcgttgtggaggtgcaggccctctactccctgaagatgtacctgtttgatctggcggcgacagcttggcaataacaccctggataaactgctgcggcaatgactgcgaaggactaccagcagttatctttcttcctgtctccaggtagcgccgagaaaagaagcaccacagttgctctgagtaagcgtcttccatgtgcggacgaggacagtaggggtcattttcgatgaatgccttgattgcctggttaactcctgctgtattcattgtgatcggaccacaggcatcaaagtcaagcatccagaggctcacgatgcgtttcttgaagttagggactgtgttcgtggtgcgctcaaatgtactagttccaggtgtaagacgcacgatgtcttgaagcggtggagggcgacgaacggaattgtggtcgaatggggtgcttcctaggacgaactcaatatccatggcgtcgattctggtatgccagtgcatgatagcgagtgcgtctgccatactagctgcagcgcttcgacctgatcgacgtgcaatttgtaattcctcagggaaaaaaaccgacttcctccgggacgagatgctccataacgctttcgaccaagaaacaggcgtaccaggcaatctttgttcaatgcatcgctcttagccgtggcgacattattcgggttgcagaagagttcgatcaacgcatgccgcactggctggggtagggggaatattctttccatgcacaggatttctcgagcacgagggaacgtgggatcgtctggaaataggtggaggttttccgaccagaactcggattctttgttcgcaaaccacgcagctcgaggaatctcgaggcctcctgaaccgtcgccgagtcggtcgaagctatcttggatccgtaggtgcatcaagtaattgttccaaagtttgtcggtgcgatctatgaggaggaccttgaaagcccacaacgtaccggcctgttcaaacacctttccaatcgaccctgtcccaatctctcgaaatggggacttacaaccgaccgccgcttgctggcgttcggcgaacgatgaagatgttgataccacggatcttgtcgagagcaaccgctttaggagagcttgggggtattgagctcctccttctcgagcttgtcctccaagtggaggttttgctccatggcatcttgcaaggagctagtccacggcatatcggttcgttggttttcgcgacggctagtcattgctcagaatgacgttgaaatgcttcgaaagctttcgaggatattgctgtagacagtagagttatatgaggagatatcagatcagatgtaaagagggctcggatcaggtctgaagcttgtatgctgtgtgaggaaggcaacttatgacgggcaagtctgaataggtgtggatggtatctttttcgggcagaagtagcacaatcccctcctatattcactggaaattacgacgcccattacttcttggtctcgagcaactctatgaactttctcgcaaggccgagtcgactctctgcctcgtcctcatgaaagctatgtgccaaatccgcagaggtctgcaagtactgccggctaaaggcgatccactgatctgtgtgtggccgtggatagaagggatcatttctgcaaaatgcgttggcagcttgcttgacgccttccagatccatggccatggatcgacaaagatcaaaatccagaatccagagcgtgtgctcccccaagacatttgtcacggtagtggtgcagtcatcgttcctcgggggtggagccagaacgaattcgacgtcgttcccgtcaatctcgcccagccagtgcagagtagctaatgcctcccccatcatggcagcatagcgttcgatgtgagtggaaggaatccccagttcaaccatttgatccaaatggagtgggtagttctgcagcgaaaagcctctgaatctcgaccttgcgttcattgccgttccgtaggttcgcctgcggccaatatatggtctgatcaggcaggcccggttgcttgcactcaacaggatttggtttctgatttctggagggcagtatctctctacgatcagtacccttacatcctcgggaaatggtgggatacgttcggaggacatggcattgcagggcgagaatccgggtgggaaatgtgagagattctctccccaccaggtgtgttgtggggtcaggaagctgtaacattgtgggatgcggacttgaggttgtatgaggtagtccggactactgcatttagtcagtgacaatttgacaaaggcatcaagtgctcgtttgtgcatcacaaagtcgtttgccagtgatctggacggtcctccatcctctcgtttgattgcagggccgtcgaggcttctagcccagacagtgccacagaatcctgacccgatccgaatgtagttctcgtgtgaatcctgcttggtggtcatgacaatttcaatgattttagtgaggttgtggaggatctgaaacggtacttcggggagttaagaagtaaactgtgactcatggatgattaaatccagacatcattctgtgtcatatatgaatcttgagattccatgaaattgctgggtaagctatatggcctaatcctaatccaaggtcgtaatccttcactccaacttcacctcttcttcattagtgagcgatcggcggatcgtcgcctagtaaatcaaagccaccatgggatccgcagcccccgcatgcatagccacgttgacaactggccctatttatttcacagctaaaacgtctacgaacacacctctttcacacaggaaatatacaccactgctacggcgggtactttaaactcttgtatacacatttcccgtttcaaattcatagagagcggactccttatataatggcttctgatagttcaacgttcgcccacacggcacttccatcagacgcacattatattcgtcttctacagttcgaagatacggcggcgactgagcctctcagattcaccttaggagtgtacaaattctcagatgtccccgtgtacaatgctctttcctacgagtggggagatggcacagctgatcgaacaatattcatcaacaatggtcccttcctcatccgcgacaacttacaccactttctcagtgttctagctggcagtgggcagagagacacactgttcttcgcagatgcgatctgcataaaccaagacgacatcccagagcgtaacacccaggtgcagcggatgggtgatctataccgtcaggcacagaaggttctggtctggataggacccggaaccaccgagtccgaccttgttttcgacatatgtgcagaagaaactcaagaggcaatagacctgcagggatcaagcggaaacgctcttgatatggtgtatcggcgctcttactggacaagactatggattatccaggagctattcctcgcacgggatgcgattgtcttctgtggctcgaaatctgcaccttggtcatcgttcaggaggttgacaactgcggtcagaggagactttgttctcgggggattcactggagtggatatacaacttggcagttcgcccctgggattacatacaaggacagtgctcggccaattagacaagaaagacagggaaggcagcattttgaacaaaacgatagacaacatcgtcattgaatttgggcaagctcaatgcagcgatgtccgcgatcgtgtctttgggctgcttggcctcgcaaaaatgcaggaggatggtcgcggccttaggattatggcaaactattcagcgacgacagtcaatctatttgtccgactgctcagtaacatgccatatactctgaggctgaatcatgcgctaagcatcttcaatatcctaaaattgcaccatgtcgatgtttgtgcatgggacatcggtattccagaaacaatctgtaaccttgttttcgaagtcgggctcacgcatcttggacacatccgacatgtgagcgagtcgcgtccattgttatgtgattggtgcaaaatgtggaacaagaggaataagcacacgccctttgaattgggtgagcaccttcggcaagaactccgcgacaaagccattactgagttcatggtgggggcgacacaatctagtctggccgcccataactgcggccctctgctgtccctggggccctatgacagctgcgtgactgcaaagaagctcaatgaaggggacgaaatgtttctaatggagggaaccaatatcgtgttgattgaacacaagccaaacccagaagatgagtctcatgagcctgtcactcggttcacccgaggggtactcgcacacactcaaagggaagagagtatcctacaagcagcaatgttgcttgatagctgcttaccgtctttacctgctccaacggaggtccgtttacagaaggcacgcttcgagcgtcccgcttacccattcgaagtcattcatgaggagctcaccttgcggcaaattatgttcattctgacacgggctgcacaacatagtagctattatgattgaagattggccgactaggaatctatcgtgtacctcaatgtgatagtattgaaccttactacgtgattttgtcatcaccgccgtcggtggacaggtagactgtaccattgacattcagatggttacccgagataaccacagctcaatcctataatgtaagaagaatctcgaccagacacctcataaaacctcataagaccccgccactatttccaatccaacacgatgatatcagtggccgcgcccgagtggggtccagcacggtttagcgcgcccgccgtgctatgacagtgatataaacaaggccatccccaatccccgaccaagaacccttacacatcatgctcccagaatgtcctcatgtaacttaatcccagccacctcactccccataaatacatattaacatgccttaatagtattctacacaaatgtcgaccggggtccaaaacactaccagatcccccacagccttaccgaattgagaacagtcgaaatactacacaatcaccgcatattggctgggcagatctggccgtcaatgatggtgaaggtaacggatagcaatataaccgcgactacggtggttgtcgaatccgctacttctaaattcaaggctacatttaccagtcttgagaacggtgtctcattacaggaggaagcggttatggggtttggtgttcagattcagtggattgtggttgatcgttgcattcatagtgcctctcagttggctgacgagtgtttgcattcgaatgcagttttagaggaaaatgtccgcttctcgagtctcaagattgtggatcggtttttgaacttcgttgatgacttcaatccgaagacgaaatgtcttattgagtttttggaaaacgtggctagtggagagatatcgaaggaggatattagagttattgataaaggttatggcgatactggaagatttaaagacgagtgattcgttccaatatgttagtagttagggctaatgatcatttggtcaccagactccttgacatagatagacttcgcgatggatttagaatagacaatacagaatgactgacagagaaatgaccagcaccgacaaatgaataaaagaaattaagaataatactccccaaccacaagcccatactccaccatctcaggatacatgacaagaatcgcccttctcgcctcctccacctgcccaccatccactaccaatccctcatccaaaaaaagaccgatctgatgatacacccagaatctacaaccctgtcccgcattatcaaactcataaagatgccgtttctctctcacaagcaaatcgacaaagtctctgaccttcaggccctccaggacatcaagtcgtacgacttttagttgccgtgcctaaacggagatcatccacacggctgacgatgaggatacccttagagccgccgggattaaccgtagccgggacggtataggaaggtgtcctgtctaagcggacatagtctatttcggtaatggagaagtagatgctccagtggttgcctccttgggggaggctcgtgagcgacggcggcgagggatgtgatgggcaagttgagaactgagtctttttctttcgcggggatgtattgaatgggagtgaatggaggctgttgggtattcattttgtgggactgggttgtttctagtgtttatggatgatttggtgttgggtggtacagcggtgctgcacactacagatcagatatgtgtgaaaccctgagaaggctcacgggatctgaatagtcaagttacagtagcctgagcgtttgtgagggaaggctcgaaagcgacctgcggtgaatcgcaaggctgtcatctgctctacccgtcacgtagtgttgattggtgcgcggcctaatgcgctataaaatgattttctgatctagcatttaggtgtacggagaacgcgataagttgttatttagattgcgtatttaatagaattgccggcctattttgatctggggattggcggaaggaagccaaccaataaatacaccacgacgaagatcgccaggataaaaactgaattgaactttattttcaatcggcacagaaaagagaaagaaaaaagaacaaaaaagaaagaccaatcaagttctaagcgccattggcgctgctgggaatcgaacccaggtctgctcgggattaaaccacaacgagctgtactgaccactatactacagcaccttgatttggtgataggcatctctagttattgaaatataaggcacaattacctgcaggtttaacccttccaatttgcatccatcaatatcgcgaaaatcttcaagggatgttaaagaactcctgggttatagggatattgtaccgattctcgtattacagtaggtctattctaccaagcacggatagtatccgccttatatactcggggaaataccggtgtgcgaattgcggtgctttgctgttcactaaacatactgaaatatatattatgactagcggctgttctagacatactaattttcaagtcccaacccaagcccttcgaagtgcaattgttcaatccgggcctgaatggttaaccatgcactttcccatgatatactcctttaagtttattcctatcaaggtcagactcagccaagacgaagccgaagaatcgacgaatcgggccgccgtgagtcatgtcaaccacgccatcattggctagaaccaccgacgtgcagatacgaaaggatatataatggataagtgctgaccaaggcaagcctattcataaagactagaaagtacaccatttctattctcccgtacagcaatataatcttaataaatacggcacaaaccggatacatacttccttaacggacaacaaacaacgtcccaaggaactagcaagatgccaatacacatcgaacccatcacccaagccgacatcccacgcatggtcgacatccaacaaataacaatgggagccagtgccttcttccgcagtacaggtgacgtgccgaacatcgacggaaccccggaagaggtatcggcctcaccctgtaggacaaacaaaatatcccgagtcttggataactgggagaaagaccccacctgctattttctaaaagctgttgacgaggactccggtgaaatggttgcgtttgccaagtggcatgtttaccacggggaagaggggatgaaggaatggcgcgcgtctgtgaggacggatgagggtatgaaggttccgcttggagcaaatgaggaagggtttcggttttgtaaggggaaattactggaaaaaaggagagtgttctttggtgaggagggcagggagcattgttgtaagttctgtttattgctgtttctaaaagagcattgtattgattgtcaatgtagtgctggcactgctagctactgatcctcgatatgagcgtcgtggagcagcttctcttctgacgcagtggggctgtgactctgccgatagacttggaattgagtgctatgtcgagtcctcgaagaagggatacccagtatacaagagaaaggggttcgaggagatatcttcccaagaagacgagaatgttattcatttcgacgctagtagatttacaggcaggggaggtaatgacggtgactgggttaatctggtctgcatggtgcgaaagccaaggaagagcgtatgctaggttattaccgagcttagaaacaggttaaccgagaaagaaaagtggtctacctaataacgatatccaagacaactgacttccgctcttcaaccacaaccctaatcccctccctcaacaccacatccaactctcccacactacgcaccctcttcgtccacaaattaccattagcagcagccttcgccacctccccataatccggcccatcctccaccagcgagatcccaagatccctattcgacaatccggcagccacaccgctaggatgcacatcggccaaacactgcctcgtagcattccaacccccgttattcaagataacagtcaagaaaggcgtctgataccgatgcgcagcccagtaaactgccgtaggcacggagaaaacgaaactcccgtcgccgatgatgttacagatgaaaggtgttttggtggtttcgttcaggtggagattaggtcgatcggagatatcgtaccgggctgttgcgagtgaagcgccgatggctgcgccgccggaccagcccagtccgctgcctccttttgtaaggtgggatccgggacgggtgagttggagctgttccgtcatgggaacttggttggtgactgagtctgtgatgtagattgtgtcctgtgggacggaggcgcggatgcggctacataggtagtcgaccgtgcagggctcattaggagttgagaggggtgctgtggcgcgggagtcgatgcgggctttcccttccttgtgggcagttaggagatcttgggctcgggaggtccaggcttcttggagggctgggagccgtggggagctggttatgtacgcgtttagttgagttagggctgatgttgtgtcggcgtggaaggtggcggaggcgccaatgtcgaacatgttcatgcgttctttgcgcgggtccaggtcgatgtggtagatttctgcgcttggggaggggtgcactcgccgtgggatccaagggacgtcggcgtctaggacgagaattacgtcggcggattggatggctggtgcggcgcctgtgctgcgggttaggcaggctgggtgggttgccgggaagcagacctcccggagctcggagtcgaagactcggaggccttggactgtgtccgccagggtaatgagttgttggactgcgcggtggcttcggcctagataccctgtgatcacgagaggggcttttgcctccaacagtgcgttaccgatcatctccactgcttcgggagagagggatcccaagtgacaggatgggacgggctttggccggggctccactgaggggatgggggtagctaggatctcccgcgttgcagtgagatacactggacctggggagccggtcgtggccatcaggacagcgcgatgcaccagactcccaacattatgcggggacttgatctccgcgctaaagcggctatagggtgccacgagggccgcctgatcgcgaatatcctggtaccactggacatgttccgagcgagaacctggagcctcacccaacagcgtggatggggcgacaccggcgaagactacgacaggggcacgtccgctagatgcattgtgcagaccctggcccagggcagcggtccccacgtccacgtgggcgatcacacatgccggtttgtgactgatcctagcgtagccatctgcagctgacatggctacgaactgggtgatcgatcagtggggtcccatgtgttgatcctggtggaggaaacgggtgactgacctcgtgttggaacaggatcatcttgggatactgacgagtggggtcattttggcggcggatataggcttcaatgatactagggtgatcggagccaagtacggtgaagaggtagtcgacaccggcctgtcatgatttagattctatccattcatgaaagaggatgagggataggctgtacttccgccagagcctccagaaacgcatccgccacgatagggcttcccacagtactttcatcggccattttgtcactgctacctagaatagaccgagctgaggtgaggatatctgtgacaattctttagtttcgtcgctttatgccagtcactgcgagtgttagggttgccagagtgtgtgccgttgcagtaacagggattgtcgacagacgggaagagagcaatcaatattcggaagtccaccggagtactacctcactaggagtatcacgccatgaccacttaattaatgtttcattctccgtcctcctactcgaccaagatccttgccagtgcaattaagctaatttagggcgcgccgtgagtgggtcgtggcccaccgaagccgagtgttacccgcagagagagaaaaataagaaaaaagaagccttgcgaagccctagaaagtgagtaatatgctgtggcattatgaccaccaaagcaccataccaatctattccaattccaccatgaacgagctctgtaaatgtagatctctaattttatattcattttctctaagaacagtagaattcatatcacgaataagcccgctcactacgcatgacaatatccgtcttcataacaatctgacccttggcaataggcccctgactacccatactctcggcatcagcctccccatagtaatcctcatctctatgcccaccggtccgaatcccggactgcgacccgagtcggctcatccggtaactcggtctcgtcttttttgagccattcgacaatgacacaaaccaagtagggataagtctctggatcggatgcttcagaaatggcagacaggcacaaataatccccgtactagcctcaatagcactccacatcagcgcatcgaaagatccccatgttggatcatttgtctttgtactttcagccatggccgacatgcgaacgatactcgttatgcagacgaagaggcccatgcagaagacaatcatcacccctattttgcggatacggtcgagctgtagccttgccaggacgggaagtggcattaagcacacccagatgtccatggcggtgttgtagcccgcccaggaccagcggaattcggcgtttttgacacattttttagggatgtccttgtgccagcttgcgtggacggggatgcattggaagattgtagcgatgacgaacccgaaggtacctgatagcacgagggcgatggtgatccagcacacgagacggaatttgcgggttgggaagaggcggaggtagaaagcgaggaaggataacttgttcaggcacaggacgagtttgtagaggatctggaagagccagaagaactacccagtcatgcaaggttagttggtaccactgtttagtatctcaaggaatcgcataccttcaatgcgaggactcggttgcctcctgttcgagccacgtcggcgcggtggcgaccgaaggcgtagtgacatgctgagaaaaacggccatatttagattttatgcagagagtaacggtcagagaaagcatacccaagtcgcccatgactgtattcacaatttgtatagcctgtttatttgttagtataattgaacagcactagtcaacgcatgatataccatggagaaagagatgatcgcatcatctgtagcgattttgcttttcatgtaaaccttccatactattcggtaggccactaatatgaaagcaatcaccgtcaaaacagcggtgaccttgacaaataagggacctttatttggaacatcagagggacttaacaccatggcttccctcgtacaactgccacggtaccctacacagagaatggacgaacgaatagaaacagatcatcagacaaaaagaaaatgaaagaaacgagagtgaaaggggacttagggaatgtaatcgtcagccggctggacggaaaaagtctcaaaaacgatcatgatccgagtcttgtggaaggatttctgctccttatacgcagtactacagcacctagcaatacattggtgctaggcctggccgcaccctgtacactcgctgggcttattcgcacggaaaccatgctgcaggacccgctaaccgagagcccaatatgacctccagctccgtcgatggttggtatctctgatccctgcacacatggtcctcgggcagaattggtccgtggtgattgatgacaagaattttcactggtaggaggttgcggttcttggcacactggtcataacccactctcccactgcaaacaccagaaattatccacatctgtacttgagtagggggttggacatgattcatggtgtcactgtcaaccggactggagccgtgctgtacatcgagaacggtcttatgcgcaggagcaccggcgtgggtcgttgtctttagtttggtaatccggtccgttcctagtggaaaggatccaccccggtgggatctcgatcgattccccggaccaattagggctgttagttgctattccctgaactcggtcaaaccttgttatggctaagcaaatggcaaggcttgcgaggcttgcatggagaatccgcactaagggctaatgtgagacgagactaaacaaattgcgctacacaccaatcactacgctgtaaagatagatacgtaatcattaattgaatatcccgtattgcagattaaattaaatgaaagcagcatattagcgcctgttagtatcggcacaatgcgccctcatacgatccagcatctcctacagctgaaaccgaaagtctgggtgcgcatctccgagatcctgagcactttccggagtccactccttctcgggctggctgtcgcgacggcggttctctgcgcgcaacccgaaatagtacaccgtgctcgccactccggccatgactgcaaatcctaacccaacgccgaatcccaccgggtatttgggggactggctggtgataaacacgttcccggacacaaaggcaccgcaattgccaaatgctggaagcaggcccatacccacgctgcgctttactcctttgccgaggttaacacacaaccataccaccgtgattgacatcatgatgaaagcaccggaagccacaaagaacatgcccatatagcggacacccgctggcagatagtgcgccagctggacactccaaccaataatgatcaaaaccgagccgaaaagagtgaataggaagcggtgtcgtagatgatcactcaaccaggcactggacagcgtcaacacaaatgcgaccgcatagataggaatgccgtgcgcctgagcggagcgggcggtccagccaaggtccttgaggatggtgggctggaatgctacgagagaactggcgctttcttcggcaccgatgtaggccaggacactgttgcactggtcagcgagtcgacgcatggaagaacagcgagagacaaatagggcttaccagatccatatcttccagtcggccgccatactgagtacccgtttgaacgaaatggggtcgttgcggacgccaccaccatcggcctccaggcgagccagcagcaacgccttctcctcgggcgtcaggaaattcgcgtcttctgggaaaggtacgacaatccaatagcaaacgatgctaatacccatggtaatgatggcttcgatcaagaagagcctagaaagtcagacgagaatattcagcgagagcagagagcctaccatcgccaccctgcgtatccgctgagattcaaccccgtcaagagactcgagaaaagctatatatcgagtgagcagcgatccaagcaagtattatcaacttgactaaccccattgattgcgccggctgccatattggcactgaagaaaatcgcatagcggcgcagaaactcatcccgcttatagtagctcccgatcaaatatgcgcagcctaagcatgactctttatcagtatttattcatctgagggattgcatcgaaggagctacgaaccaggaacaaaccctgcttcacacatccccatgaaaaatcggcacgcgatcagccctgtcgcagtcttggtcaagccctgacccatcacaaatagccctaccgaacgatctcccattagcacactcccagttgaagcaaagaaatgcggcctcaccccaagtgaacatgtaaagaaccagcattctaggaccgaatttcttcaccagtagattggcgggcactccgaagatcacgtatgcgacagtgaacattgtaacggcgacattgtaatcatttccgaccatatgcagctctttgaccattccagcgattttggcatttctaaggtgaaataccaatgttagctttggaatagcaaatggttgaagcaggagcaaatagctcacccgatattcgatcggtccatgaacgacacgaggaatagaaaccatagcgcagggatgatccgccagtccaatttccgtagcaactttttctccaaggctggatcaaagtcgctgctcaaggactctgcgacccggggctcaatatctcgtttctccatcgtcgtatgaaatccaatgtattactcagaaatgggcggaagaaattgcacagcacgatgcgaggtacccctggttttgtgtatggaaaaagtgtcttctggctcgggatttccgaagggcacaggagttagtaactaactagaatatgcaagtagcccaatctccgtgagaatcaaacaattaatccctgcgcaggcgaatatcctttaatggtgggatatggcacgggtatcattgcctatacaccattatcttaggacgccccaccatggtctacgtggacgcaccttgtggaccctcaaggccagtctggagcgcaggccatatattaacctgaactcacgccgtgttcggctccaccacctcggcctctaacctcgtgcggattctcatccctgcattccagcagtagcggtttcaaaccgcatcctccggagaatacccggcactgcccgttctttatagccacaaccagactcgggttatattaaccgagcagctgctgacaatgcaactatctaccaccgatcagggctgattcttgatcagatacaggactatacctacggcaattttgtgttactctcctgacatatgctcagtcgcccatcttgttattatataagtggggcgctgaatccttacctagactggcttcccagctacgattttgtgatgctattagcagctatagccccatgtggtgcatcaaattgtctcagtaatacttccggccttgaaatcgacatagataacattggggcttaaccgtaaacctacagtagggctacctggagtcttacataaccccagactggtgtacaaaacttcagctccccgcaatagttcggggattaggattccattggcacttgaatggacgcatccaaggtatccccagtttagtccttcctgctcatccgaactgtaacaccgccaagccgcgcactttatggatcccatggtccctattgaaggattatcgatgcataagccgacgccggcacccttgtaataccgcaggatgcatgtacagaatcaacatggcttaagtgcagagcgagcttacggttgcacatggcgaatgtataagtactcacatgcaggccagatgctgctcaacttagcgatggtcactcatgtcacattctctagattttctctattgatcaatccaggaagatgactttgagtgcagaatcatcccagctgccatgggctttgggcaatattgttcaacaagtccatggaattccaatttggggtaccgtcttaaccatattggtacttgtagtgttggtacgtattctcttcatactagtctcgtgttgctagagcaattctgatggctgtcgcatggcatccactaacttcactctttagcactatgctatctacgcagtctacaacattacatttcatccacttgcaaaataccccggaccgaaagtggcagcgatgacccgcatagtgtatacctctcacttactctccggcaggctcgttgagttcctccaccagacacatctgaaatacggagcagtagtgggagtcgcccccaatgaagtcattttcacttcgagccaggcatggaacgatatatataacgttcggcagggcgcgccagagatgagcaaagacacaccactataccaaagtttgggaactcctcctacgatcgccgaagcagggcacgaccttcatcgccggtatcgccgtctacttgcaaaagggttctcggaggctggattacgggagcaggagcccgttatacagcagaagatctccgtgttaatcaaacaactccatgctgcgacagcaaaaggcactacgccggagatgacatcgtggttcaatgtgggctatctctctctctctcttctgatctcggttgtgtagttgcttactctttccagttcttcacttttgacctgatttcagagcttacctttggcgaatctttcaaatgtcaagagaacggccggtttcacccgtggatactcatggtcactcagtccataaagttcagagccattattcaagcgctgggatactatcctttactattcaaactcttcatgggcctgatcccgaagtcctaccaggaggcattcagggatcatcagaaactcacttctgagaatgttcagcgtcgaatagacaagaaagtcgactataccgacctagcctcgaatcttatagatccgaaacacaatctcgaaaggtatgagatcgacggcaactgcgccgtacttattgtcgctggaagtgaaaccaccactactgctctgagtgcgactatgtattatctgacccaaaaccccgaagcaaaggcgaaggtgatcaaagaggttcgaagctccttctccagtgcagaggagattaccgcgatcagcgtcaaccaactcaagtatctaccggcgtgctttaatgaagctatgcgaaaacttccccccgcgccagctgtgtttacccgccgtgtccccagggagggggcatatattgcaggaaattgcatcccgggaggcacgcacgttggtatgtgccattttgctacgaataactcgagcctcaacttcaaggatcctgagaaatacatccccgaaagatggttgggtgatcctgagtatgaagatgatgctcgcgctgcaatgcaggtatttagcgtcgggccgcggaattgtattgggcagaaccttgcaagattggagttgcgccttttgttatcccgtgttatatgggagtttgactgggagctggactctgcctcgatggattgggacaaggacatgccggtctatcttagttggggtatgaagccattaaaatttcattttgcgcctgtggttcgctagtctgtcagtggtgaggatggtatttgaacttctagtatgattacgtggattaattgtgttgaactggttgtattgtccagcgaagaaggcattggtataagaacgtggccattgcagtgagtcatatcaaaactaactgctcgtaactggtaatacaggtttctacacattctttataagacggtcgaatcaactctcagcattttacatttttgcgttagcgaaataaaatgtctccacctacgagtagagccatagctgcactctatacctatatggaaagctgcgttaacgtggagactagtgactgttggatactctacacctgactttcgtccaccaatccgactctgcaggcaaatcctatgttactccgcaaagcccagaacgatcagacagttttgctcaagcccaaagccttcgttacccgagtggcagttgatatctggaccagctatcagccataaacacgaatgccatgctacccgctttcacccacactacattgagtactttttctaacatcgctgcgtcgatatacctgtgccacgtccgcaaatgttgtgtaatctgctggcgtaatcgtccccccatgagtgatatgatcacatccgcatcataatcccacttggatagtgtgaatggccgggcacctgaacgatgttggaaataatgaaagacggatcccttcccggcgaacaaactgaagagcgcactggacgaactgggaaatggacgcacgagagtatgaagtgttttaatggatgaatggctctaaattgactcgagggcctgggaacacactgcacttttccgatgctgacagagtcaaggaacatggtctgattggtttgcagaggtagcacttctgtgggatatccttgctcttatgccattgagaggcacctatccaagggaggcgcgcgtacacggaagtactatgaaggcttagacggtggtacagatgcaacaagatatgtgatcaaatcacaggaaataaggaaagataggacaggaaaatccggaaagcaatagcattcacgaggcatcataggcatgcttgtcatgtctacctgggctataatgatccggccggtcaccctcaacagttgacggacaggtgtccccaacaacgtggttgattttgatactgaccgtatggaccgaaaagtggtaatacgattccagacgttaaatatctgtttgtacatgccactgcagtcaatatcagtcacttggattgatgaggcttgaggtattggacaacctctgctaagtacctccatttacatcgacgatgctgcagtctagttagcattggatttcatgggagatatatgccaatgccccatcaagggttccgggatgagattcgaagaatatatggagagtttgcgaaatcagccattcagagtatttggtttccatgcagggccactgaactggggagtcaactgcttattactactagtagttttctagctgaatacggagggggcctagtatcttcttatcgagggcgcagagaagagtagatatggaagaggtttatataagaggaattgattatccctgggcagtatctagttgaaagtcctgcttttggattgtttcggtgttgtttgatattcttctgagcttctcggaatcctcaatcttgcttcaaggggcagcgtggtaacaaccagtcatctcactcaaccgcccccaacgcaatgactatgcaccaccatgaaggtcaatgtagactgaaagaagtcccaaacaaaaaaaataaaaacatacaacaggagggattcgctggtggtcacccacccaactactaacctcccggcgtgtggcttaagtacggctgagcggacgggaagccctgttttccacaccctatggtcgtatgtacttgctcttttcttctagaaaattatatagagacaattgaatggaactaattgtcctgcaacagcattccattcagtctctggcgtgtagtccattgttggcctgccagatcaggccactgagcactctgcataaacctgcccaagtaggactagcgccgatgagtggtagatctgcattcatgcctgaggcctcttgaccgttgtctatcactgaagctcctagagcattctacgtttatagtggaacctaacaagcctttggccttgtgagtcgtaacaatccatgttgtaatgtttaaggatgacgagtgtagctttataattgtacaaaatttgtatgcctcaatattatgtacctacggcaattcttcattgagtagtcaattgaattaaattttacctcctaacggggcgatggtttgaccgaaaaacagagaattcaattctgtccgtgagacctgagttaaggattaaagttttttgttgagatgaatttcaatcaattgtactccgtactaagtcgtggcaatgtggcatacaatctccacgtaacatccacagtggagagtgtggaaaggggcctcgacttgagtcacgatggaaaaattctatagttctcactttctcccccgtgactcaggtatcgtgaccccggtcaataccccatagggaaggaccgccattccgaaataggctaagggatggaaaccaggggaacaaggctctcaaaattcacatgactggaccgggttagggctagggtacgccgaccggcatgatgcggcttatctgacgtcatcggccccaacgaccgcgtttgcaacggcgtcaaatcgcctctggtagccgacgctttccagcgtcgaacagccgcagatgttggtcggataaatcaaaagaagaagctatgacttctaaaaggaaagtgtttccagtgagagattttatccctcaccgcgtgatggatcgaaaagagaaagggataggctgctgacccatgaatctcattctagaccggcccggcgtccatgattttaggtaatggaaatgaagagatttcttgggatgaaatcacgttgcgatcacgtcacggccattggcatggatcgtctataaatatcatcacgcaacgaattgcgtggctgtcgtgtctggatctgctggagtattgaatttattatttgccataatttgtattcgaattatttctaggggcaattgtagtttgaatggaaaggagggacgggaggaagggaatagaattcggtgcctggaagtcgatcaggagaagacaaccgattctatgagagatttttttttatttcctcaattaaatggatttccccaattttgaaaaaaaaatcgaattaaaaaaagggagatcgacagggaggagatgaggacctgaggtcctccgcattttcctcccccgcattttcattaggtaaatgccgagaagcgcatcgccgtgactggtccaaggcagcggatccactgacgttgtcaagcttccattttgcctcacgtttccattgttggggatcacgtcgttccaatgattttttcggtcagcaatttcttggacagcctgcacccaatgcctggtcatatatatatacccccgaccacagccactttgctagtccctccagcttacaaaatcgtgtcatcatacttcccctcttcgttatcagatcgatctaatcactggccaatgtgctgccggcagtcatggcgctcgaatctctcccaacagaactccgcatcctcatcatccaacagcttcctgatgtacaatccctcaagtctcttgttcacgcctccccggtctactacaacacatatgccctctccaagaagaagctcctccatgacatcctccaaagacagtatggtctcgtagacctggcagagccaatggctgctcttcgctcccaaggtctccatgccgacgtaccagccaaccgggatgagattgtcactctcctcgaccgtcgccgtcgtcatgacgagctaccggtctccgaaaatgcccccgcagacatggaagaatgcttacagctttcccacttctaccgccaactcgagtatctcctcaacgtctactgctcccaagcctcctgcccacccggcgtgtcgcaagaaacatgggaacagaaccgtcccatcaacccctctaatactgaaaaggcccgtatcctccgcgcgctctgccgtcttcaaacctactgcaacatcttcggcgcccgagaatggagcgaagagcacgccaccgagttatcctctccctcacaatcccgcttcaagcgcagatcctcaagctggtaccgcaacttcaacctccacgagatgtggagtatgatcttcggcaccatgcctccctgggaggttgaagaattcggctgtctctgggttttcctccaacagcagtatacggagatcttctccgagattgcccaggagttcccccggaacagtcacgaatggcaatctcttcgacccacggtcgacggcatggaactgttccccagcgttgacggcgatggaagcgacggcaacgactacaacgactaccgcaaccacctcgtctcgctgggtccatccttcctctacaaagtcctccgtcaaccatcctacgaggcacgccgcaacctcatcgcctgtaatgccgtctcctccaaatcctcctttatgatcctcgtccaggtctcccgggaccccccatccctcctctacccagccgacaagtacgaaagcgaagacatcggcagaactctcccgctcatgccggccatcgagcaacccaacagcggctggaagcaccactggcacggctacgggcccatccaccgcgtccgggaagtcgtccgcagcgacaacctccaggaaccctggatcgagcggacgatcggaaactccgctggatggcaatgggggtacgcgatctgggacgaggaacgaaatgcggccggtcaccgcctttaattcccattcccaaaaaaagtaatcatctctaagagatggaaaagaaaagaaaaaagaatgcatcatccgtgaatcgaacacgggcctcatcgatggcaacgatgaattctaccactagaccaatgatgctgactgagctattggctcctgatgaagtttattggccttgaaatgcatttgtggcgtcttgatttctgggtttgcatatgggtttagctggttttggcccatcatagtgacttttaatatggatcaaaaagttgtgattatttcttgtggaggaatttgagttctggatggaaattgggatttgaggatatcagagctctcgcagattataccaaggtagagctaaaattgagaatatatctcatgatgacaatttgcattatatatatttcgtagacactagactgctatcttgccaaaagtatttcaacaccaacatcacgactaaaacaaaagataccggaattatccgataatctacttcactacaaacaagttaaaattacataacatatgcaaggtgtgtattgatcccgctaatatcaaaagcgatcattaatcacctcataacagggcagaacacccacatgacataacatatagcctcattttctactagcaggatattgtacaaattatttattttcactttccattttcgggtcccctcggaataaatccggttggccaaaagtttatgttaagcttaatcctgctcgaagtttccgggtatactactgtcgagcacggatcacatctaatatgtagcttgcttaacatggctattactaagactgtttttgagtctgagttcgtcctagagctgtgcctgtgtatcttggttaaggttcattaccgtctagatgtttcggggagttttcatctggtggtgtttgtcaagcatatgctgtcgctactgccagtatatgcaggtgtcaggtgtcagaaggatggtagtaatacctgcataggtagcttatcgtattggcaattatacgatttagaattatcagtcattgggataaaatcttggtactaaatagtgtatattccttttctatttggctcgttctcgaatccccaggcagccctctccgtttctcaggttatccacagttccaggaagccgagaagaacaccacagaaccgcaagaatcaagctagaaacctgggtagtatctatactaacggctacgacctggacacctgccagccggaatacgaccaacgacgaccaggacatttgtaagttcttcattgcgaattcttccccgaggaaagttgtcgattttgacgtcgtctccgaggatactggtattgtcggcttcagtcagggtgaacgattgaccaggaatatagctactgtaacccataacgcgatggcatgtttgaaaatgtgtgtagctctagtttataaagataacgtcttcgattgtactatcggtacttttctagcgtttgtgctcagaggctgtggtgtcgatgtctaagtatgctagtacttcttcacactgaaactatggtagagtggaggaaagtaattacaagattatatttcttcagagtagaattggaggactaccagaaagcaccacagtatatgataaatactgaaaaagaattgtgtaagctcataacatgattaagaccaccattcatgcagcatgaaagcaagtctggcaatatgcaagatgctagccatgctttcagatcattaaatatccatcaatgaccctcagctatgaacctgtgatactagtgcatcacccataaactatccccaagcaacaagacaacaatgcccacaagagtctgcaatacccgcccataccatcatggacaacgtcccctaacatccactcaaaccgccatatcaaccagtttattcacaatttcaacagccctagtgaacttgtgccgctccgtctcagatggacgtacatcactgtcccctcccacacacccctgctgaccgccattacaccacgcgaaatcatcactgctccacgaaatagaaatatcctttccataaatatcctctgaccccggtggactctccaagggcaaatcttgcagaatctcataaagttcagtgacaagaccttctacctcgtccgatgagtcgactgttctctcaggtttatcttccaggcctgatccgccatctggacgaatagattcgtagatgctgatgtacgagttgtcggcatctttggctaagctgagaattgcggttggggtagggggcgcgaagcctcctcggataccttcgaaccgtgtgttagatcggaagtagtagatttgaggaagatgtttggttgactgagtacttacccttctgtagtctgatagtgtaccccgaaggtgccattgtttatggaagatattttggtatggatgatgtatgtagagtatgcaatggagttgtgggttgaattatgcatttatgatccatcgcgagccccgcgatctgcccactctagcgtatcttggcaaggcggcagtgctacgtcatcttgcattgtgttatattgaatgaattactgctgtgactgatgtatgtggttaagggtgaatggagtatagaagtgaagtctaggatggttccactacggatacatctgctaattggggaataacttggattacaatcaagagttgaacaattagggcttcaatgctttagaacccacgcgctagacctatctaggatcgtgcggggtttctttattgggggaataactagcgatgttataatagcttaaagcctggatatcacacaccatatgctttgtttggtctttatgttgcactggattcactctggttcacattcaataggtgaggtcatttggatcgttgagggatacaatcaggaaaagcatggaaactgtacatatgtctggactacagcagatacgaatccatgaggatattcactgtagatctgataatcattaatgaagatagtatactacttgtcaacgcagagttttacacacttcattcttggtggaagtggtagactccagcagcaagcaacattaattgtctatatatactctctctccaatgtaaaaactatcacatagtaattctcacaattaaccccaacagcaagcacaacaacacattccctagaaatgaacacaaacccaaaccacatagcaaatctctttagcgacatcgtccacttaatacgaaaccataaaacaagcagaaaaaccaaagccaactttatcgaaggggagctacatatactagccgaggtagggttattcctaaccaggaccaaaaacaaagtcgataacctcaaatcccctgacaagataaaatccttacttgatttcagcatcaaaagagtcgagctgcttctcgacgaattacgggcatatgatgccgtcgatcgcgtcgatcggactgggatacatattgacatggagtcccgtatgcgtgatatcacgtgttctttttatgcgactagggcccgactgtgtataatcgatattaggaagccttggggtatgctgttgggatatgatgtggaattgtcttggaggcatctggagaagggggtggagcagcttatttctgagtacgaccgagcggaggttgaggcgttgaatggtaccaacagcatatcattgaggggttgaaaaagtgatctggctgaaggggttgactaaatttgtgacaagttcctgtttttgcttgttgaactcagtattgtgggtttagcaatcgaacctgttgataatatgatatgaggcttatggttgagtaatcctctgttaactatgggttatagaactacgggttatagatcgttttgctcaataaccgcacctagatatggggtctttcaatatatgcagcgatatcctcccctggaactgtgcctatagcagattccctgaataaccgccgcagctgaatagttgcatgattcgcgactgtaccctgttgctaccttatctagtgacttaagccattaaaacatactggcttgtaatcagatgggctttgagtggttgcagagaaggttttctgaaaggaccttcaatagtgtctagagttgatcatataatggaccaaaagcataacaaggataaaagaagcgaaaagaagagaacaaagaaggtcttgagagagggcagatagctttcgttcttttcaattttttctttgtttcccttttctattcgtattgatatagttaatgtaaggcaaactttggttcttcaggagctcaagcattaagtatcctggcgagctcacatccccagctatttatctattctcaggtatcagtagctgctttggtaacagaagtccactattagacttaccataggaggcaccatcattgagaaatgattgccattgaccggaaccactttaacattgtccagaaccttgtcccattgaaacaattcaccctcggcgcggtcattcaggaaccagtccacaagctgctgttccgccggcagtacctcagggcgagccacccattcctgcttatccaccccctctctcgccgagaacagcacaacctgtggtatattccgacctggtagcctacttacttgatacatcgacagctgccgcctggacaatgtgaaatgatgtttcgcgaggggggagccccgcttgttctcttggacttcgtcttcgctcatcacaccgaagcggttgatggaaattagaaagtcaaccagtgcatccggcatagaacaggcgaatgtggggcatggagtatcgatcaggaacattctcttgacgtcgttaccatattcgaggagttgtcgtgccgcttcaaacgccaacaccccgccgactgagtaaccaccaaccatataaggaccctcgggttgccgacgcttaatctcggccacgtatgtggcagcaagctcctcaatggagggagattgatccggatcaggcttaatcttgagaaaggggctgttgagcgcgtagacagacacatgcttcacctgagagagcaacggcgcgagggcaccgaacacagcactggagccaaatccatccgggagcaggaacaggttgcggtcccctgaattagaacttgtctggtgcagtagcatcgaggttgcctttgcaggacatgctttctccggctcagccaccatgccacagattatccgaacgctgcgggattcacgacttgcgctctcggaccagtcaacgtgtgcgaagcccgcatctcgcatcgcttgctcccaagcccatgggcactgcagcgcgtacttgcggccgtcatcaaacaaccaccagccgtccaacaagcccatgactagatcgtaccaggctgacctttgcgttgactctaccagcaccacgcatccgtcgttcggttgtaccaacttgcgcatgttgtttagggtgtgccgtaggttgcgcgttgcgtgcacacagttgcttgccatcacgatgtggtagcgccccaacagctcctcgggtgggttttcctcgatgttgagtttccgaaagtctatgtctgcgacgcccttgaatgtgattttcttggcatgtgctaacaatgataccgagaggtcggtgaatgtgtatgtaaaagggagtccagtggcttgaagcagcgggatgaggtgctttgtggtcccacccgtaccgccgccgatttctaagacatggaagggctcgcggtttgaagcttgggagtgaatggctgcggtgaagaaatcgcaaagcaactttgtagcagccaggaggtcgggtgcattggcgtagtagtcgtcaaggaggcggcgaccttgatcgctaccaaacaaaagggagacggggtccgacttgcctgtcaagcactctgctaggtgtggtccgaggaggccgagtagaccgtgcgtagatgcgtagtgaggaaactccgatataagctccataatcagctcctggccagaatctttcctactgtcaccgtccagagaaacagggccgcgtatggagtcacctcctgttttctcgactaggctgacctcttctaacgtctcccacagccagaggatctccctatgatacttcggcagcgttccttgcagatcagggagattctcccctgggctgaaatccctaatgggacagtggagcttcttgaatgcttcaagaatgaaggctgtagcagtcctcagctgtagtgggtatacttgatcccagtagccagtgaacctggtatccttcgcatgagtgtcgaagcctcggcagacccgttgaaaagccgtatgtatcgacatcctgtcgcctttgactaacgttgacttctcactccctgttggggtagttgcacctgtatctaagcccatagaaagatcacttctgggattgcagcgtgtgtaagaaaagttggataaactggtcgtaggagttcgtaccgaagtgttaccaccacccgcaatataatcacagagagaagccacatcggccattgtagcaaattcgctcggtgatatattgagacccaagtctttgttcaagttgctgatgatctccgtttcaatcagtgactcgacaccgagatcctcgagtttcgaatccatctgaatgtctgtgactggcatgtcgagagactggccaaggatgtggaataccgtcttctgccacgctggaatatcatcatcggcacttacagatacagtgtcaggatcctggtcttcactgtcgacatcgctgctggcggcgctgtccactctggaggaaatcagttcacataaacacgcaacatttgtggctactttcatttcgtcagttgagatctgggtctggaatttgttacggaggtgagttataatttccgagctaaccaatgagtccacaccaagttcctcgagcaaggcttgatctgtgacctcggcaactgggacgtccagggactggcttaagacttcttggacgccatgcaggacattggctgagcctttctcactctcgctggactttacctgaggcgcagcagaagcgacttgggaaggaactttgggcgacagtggtggagtagcaaggttagtcgagcccacagaattgttgaactccatccctggattagcccctcccagcactttagctagcgagtcccgagggaccctcgagaagtttagtcccctggcggaccaaacaatatctctagtctgcgtgtcaaatgcaaacacatccacagcagtctctttgctgtcctcacggacaacctttgtgtatactctgtatttcccgctagcctgtagcctgttcaggggtcccacggagtccattcctgtacagatgcaagatgtgttttcagcctcctcctcatcggtaacccgcagcaactgtatgaatgcacctggaacttgcgagaagctgtccacaacgaccgggtccgaaatgccgacgttcgacgccttggctatagcattcaactcgtccacgggtactgtgatgtccccggcgctttcggagcccttgccaactaagtagcgtaggcccttgtagggtgctgagtatgtggccaattcaccgaacaccttatacaccattgcaccgcgcaaagcatccgtatcgctatcttcctccaagaggtaggtgatgcgggcccacttgtcccttttgtcccgtacttcctccacgctgctagtcctgctgtttcgcaaagcgatgctccccgtagcatgtgaaattgtcctatcattcttagtcgagaatatttcgaagtcccatgtgccccgactcttttcagtcaaggtcaaaacaacggaccgctccatgtccaagcctaggggtgccttgatatcgacggcatttgctacaatttccgggatgttagtcgctgtgtgctctccaagaagtaagatgacggcgcgtgaggctagctccaggtacattgatgcaggacatattggagacccaaccacgacgtgacccttaacgaggtcctggtaccgcctactacgcatgtcgattttgaaaatggacctgcccatagtctgggtctgggacttgtcctgcactatgtacgggaagcgatcgatatcacccaggcagtgagaacagattccacctcgtgctggctcttgctcatctatcttcccatctcggttacccccgagaccagtgtactcgagccagtggcggtgcttctcgaactgatacggcggcagagacacgggcacgaacttcgcccattcactccggtggaacagccagaactgtacgctagtctgtccattcttccatagtgacaccgtggcgtcggccatggattgcaccgggtctgtcccactgattggcatgaaggtatgctgagactgggtttgaggttgcggtagcgcattccgcgccatggttattattggacccccgaagccggcttccagaaaggtgcagggccccaggcagttgacaatacgtgagatggccggcccgaagtacacaggttcgcgagtattgcgggcgatcacattagagccgggcccagtccagggttgctcgtggcaggattcgaaggggaaaacgggggtctgtttgcgagagaagagagggttagtggtaagttatccagagggcaaggctggaaaggaaacatattggcacgattaggtatgatccaacactgacctggaatggtatcgaggctgacaacttttcactctcgtcaatgatagcgtcagccatataagaatgatacgcgtgtgtaccttcaaggactttgaaacgcagcttctcgccgctagatctctgttcgtttaagtacgattcgagcaagtcaatgtgcgtcgtgcttccggcaatcacatagttattaggtccattgtaacaggcgacttcgagcttggcttctgggtgctttttgtggaacgattctaaatgcttgcttggcgttgtgtctgttcccactaagtcggcttcaatagctaccatggacccggggtcgtctccccacaccttctggatgatggctgcgcgtcctactgagacgttagtaccctatcgttcttacatctagttttggatcccactgtatatactagttagcattcgcccatacttggaagataaggcagtagttcaggaggtggacaacgaacccagtagcaagcttaatgccagcctcaagcgtcatggcacccgaaaccgtgagtgcagcccattcgccgaacgaatggccacagattgcctcaggcttcacgccagagtcgatccatgatttaccgcacgagtactggatggagaacataaccgcatggcagaggacgaggtcgccatcaccatcgatgccctggagaacggctggaaacaggcttggcagaccaagtgactgcatcacttcctcgcactggtgtaggtgcgtttggaacagcagagagctgtcatagagcggtttggccgggaggatagcgttgccattttgtccgctgaagaggagcactataggcttgggaccttcggaagtggtgtgactctcgggctccgagagctgggcttgtaggtcgctcactgagttgaaggaaatcagcagctattacctaatattaactcaggggagctttagggcttcttacaagatgtggctgttatgctgaacacatgttggagtttacgattctgcttcgtagccaaagcgaaagcaaggtgagaagtcagttcgggtgcaagtgagccttgctggatctgaatcttcagcttgctacaataagaagcaagactggccttggaagcagccgaaatgaaaataggccacgcagagaccgacggactaggcgtagctgaagctatagacaaaggtgatgattgtgaactcggaggcggaggcgcaacgacagcagcagcgttgttacctgatgcgccaaaattgttaactactgccaggcgcaacccatcacaccaatccgttagcgacgttgggatagtcatcatatcgggctcgagggccggaatgcttggattcaatgttaggaattcagcctggcctgggatctttccgtacttcatcatcagcaagaccttgatcagcgacaccacacctgaggctggctccgaatgcccaatattgggtttgacagcgccaatgtacaagggtgaatgtctatccttcccgcccaggatctgccggatgccttcgacctcgactggatcaccggcacgcgtgcctgtgccatgcgcctctacatacgagacctctttagggttaacgccagcacggcccagcacggcccagcacgtctctgtataatgcactctggctctcgacagtcgggttcgtaatactggtactcttgatgttttggttgttaccggtagccaacagcaccccatggatatgatctccgtctcccagcgccttcgccagcggctttagtaccacaacacccacagcctcaccacgacagtatccatcagcacgggcgtcaaatgtcttgcagggacctgtctcattgatgaatccacctacacgcatcgcgttatacgttaccatgttagttatcaagttgacgccacccgcgacggcgcgcgtgcattcacctgcctcgatggcacggcaggcttggtggatggcgaccattgctgatgagcaggatgtatcgatggtctgtgagggtccagtccagccgaagtggtggctcagccgtccggctacaaacgagcgaagcaagccgaagccagtatacggcgagataggatggcaagctacattcagagcgtaatccggtgcattcatgccgataaaacaacttgttatctcactatcactggacttctcgtgtgtttccgcttcttgtttctgaccaccgctgaagctaccggctgattcaagtgcatggtacgttgtttcgagcagtacacgctgatgcgggtctaaggctgctgcttcgcgcttcgactttttgaaaaattgatgatcaaacgaatcgacatcgtccataaagttaccccaagtctttccatccttggctaccccggggaatcgcgtctcgtcgatctctcgtgtcatgctcctatctgcctggatgacctgccaaaggtcgtctgcagtatctccagccgctgtgcgacaagccatgccaaccactgcgaccgcatgctcggggtaggtttcgtaaggcgcagcggtgctctgcattctttttttacgcattgtgatatccttgagcaagggatggcgcaacggcccatcggcctcgagcttcaacaccggtacaaccaccacatggtcagtctcaagactcacgatgcggctccaggcatccatggcttcagatgtgctcacggccgcaatgccccgagcctccatcgccctggtgagtatccgtgtgacggacttcgtttgtgccgctaatcctacgcctcgccaagcggtccacaggatggacatgctattgtcaccatggcgtcttctgtgtgccgccaacccgtccataaacccattcgccggtgcgtaggataactggccagggaatccaatgagctgcccgattgatgacataaagaagaagaagtccagcgtgccggggggaaatagcgtatccagagctagggagcctctcacttttggggctaggacatctgcgacatccgacggcgagcaatgctgtagtgtatggaagcctgcgacaccggccgcatgcaccaccccctttatgcgtgggatgttcaattcgtcgatggcttgcctgagcagagtctctgcttcaggtttaccgaagtcaatagatagtacatggaccgagatgcccatatccttgagcttggcgattcgcgagacgagcttctcatgatctgcattttttgcatttctgcctagggctggagtgagtccaccacgagacaccagtaataagttatgagcaccccgctcgcccaaccatgtcgcaatttccagcccaatacctcgtgtccctcccgtgatgaggtacgtgctgttctctctaagctgaagctgcttctgatcgttcaattggtcctggaatggttgaagtgaagctgtctgcggtacgccctggcatatcctaacaacgtcgaagccctgcgcgtacttgaaggcagacaacggaaagtgcccttggtcttcatcaaataggccgccaaaaccctccgccatttccgtcttcatgacccgcgccaggccatacagcggggcatactctagaccgtccgtaccggagtccctcgagatgagcgagaaaagcctgctcgtcctgtctcggctgtcctggttatgatgatacagtacctgcgctgctgcaatcaaactggtgcacgacttcgtcaccgcttcgtagacgccgctcttctctctggccacgtgcgggatgtgaacaacaatcgtatcgggcgttaacaagggggtgatctccgtagcatggccaataaagacagttgttaagccctcactggcaagctgggcctggtatctagatagcctttccctgctgtcctcgtctgcggctaagaaaacaacctttcgaaagtttagcggttcagtagagagttcggcggacatccagtcaagccggtgaatcatctcgttgatggtcatgacgatttgttctattgaatactgtggattttagcgataacgtgttgtagtagaagggttgttcagtgcagagtaaacaacgtggcagcgtatgcgtgccagactgatttgaatcctgactgtcggcttccaccttcgcaatatctacgactttctgcagtctacagtatcagagcttttatatatgaattcctttagtagtaaacctactactaaggaaactatagaatggataaaaatgtttaagcttattccaactatttcctattctagtatatgtcgtcatattagcccacaaaccgggatcgttgagatatgcaccgtggtatggatctgaattaacccttgcctgtaaccaggaaactgttattagcagtcgcacataggctcatttactggtccgacgtatgagcaacacgtaggctgcctcatctagacccggttgccggcatgtctgatataccgatacaaggactctgggccacgccttatatagccttttgactttaatagagtttactaggatttccattatcttgattcttactttgtatagttatgttaacaatactcatgatatactctaactttctgatactaaaaaagggctataagacatcttaaagcagtattgcattcaagatcagaccttgccaaccggtgcgcctgcggaacgtggtaggccaacgggcttcaagaaacgcagtactagggagatcaaggatattcggatttctaaacaaaaatgtattgggaccgaaatggaacgaatcagaccctcaagcaatcggaatctatataggcgctcggtaatcgttgactgaggcaactgccgttacaactgagcagtaactcagtggtcatgggtcacattgcctaaagtcttgttcaaccacgcatggatagtcctcgaaagctcctgcccagcagcagtctggcaatgaaagccagccacccccttgaaagtatgcagagtagcccagtggcccagcgcatccgccacctgcttcggctgtccaacataactgctctccagtgcggcatcaccgacaaacacagggatcttgattttgtcaatgaaagacgacacgttgtactgcttgatctgggtgaagaagtcagagggcgagtgcgtccggaacgcccacatgccttggtcaatgccccaggcggcgccggtggatagcattccggctttccgagctgagaggaggacgtcgtcgaattgcgtgtagttgcccgcctcgtagatggcgagcatttccgatgatagctcccttatataggcagcgtagttgtcccagacgccatcaatcaagactactgcggacaggcggggctcgaacgctgcgacacgggcagccaggtagccgccgagggagttgcccacgaggaccagacggttctcgtctatgacgtcctttttctccgagagaacataatccacgacggggatggcgactttctcccagtcgggaatgaaaccaaggttctggttacggcgcaccgttggttgtcctggaccttcgtaggtgatacaattccatcctcgggccagggcgggcgccacgtagttgtggtaagagtcctcctgcgcagcgtcgaagccgttcccgatgatcaacgtcggcagcttgtcgttcttgctctcggaagcagagtaccagatagcctcgacggtgaagttacccttggtagctggaatgcggatgcgcttgccaggaataggcaaagcagctatacccttgttgaacgcctcaatctgctcggcccacaggctgttgatgagcggattgctccagttaccgtggttgtagacgtcagccctgcggaagtactgcgccgcagagaaccacgtgtccctgacattgagagggtcgtaggcattctccgggtcttcggcctgagccttggtgtcgttggcgagcttatagaagacctcggtgaaggacgtcatgtttccaggtttgatatctttggctgcgccaaggataggcccgacgtcgcctcccccagtgatggattcgccgagaggcgttagcaagtcgaagttcatggttgagtcattgctcaacaacagcatggtgctgttagctgtgctatacgcggcggacgctacaccgcaatgcagcagagcggccaacagtgggccggtgtagacggaagagtgtaatttcatggcaaataatgaagtaaaaagagagcttgaaagaactgtgatgactataccggttcttcctgattgatttctcttttttcttgtgttccatctcttcttcttatacttcttatatcgatgtaggcggcaattagggcacaagtcgtgctacgtcattaggcctttcccaggctaaaccacatcgagtaagcgttttgcgacggggtcctctgattggtcgcgcccgcgagccactgctattataagtacgagtaagctcactgctgtaactcggctgtgcacgctttacgataaagttacttaattttacccatccatcgcaagcagatctccttttccggcaccgtcgctgtcgcaatggttaaccgcggacgctccggaggctgcgtgacatgcaagcagcgccgcgttaaatgtgacgaggcaaagcccgagtgccaagcgtgccaacgccttaagcttcgctgcggaggctacaacaggcaccagaataccaaactaaagttcaaagatcagaaccacaagttttgcaccaataccaaacaagatgtcgttaaggttgcaacaagtagtccgggccggtcgcctgagtctaatgtccaggaccgggaggttgtgagggctttgactttgcggcggctctctgagcccgacaccgccgtgcagttctatctcggccattacgccagcatgggtcgcgatatggggtccacgcgcggattcttcgaaatgctcattccagcatatttctcggagcgggaagattcggccctctcactcgccgtgtcagcgttggcttcagagaccttgtccatgtggcgacaagatgccacgagcttccgatcaccacggaagtcttattcccgggcactcacacgccttcagaccgcaatacaggatcctatagaacgtggcaagccggcaacggtgttggccgtgctggcgctgcagacttacgagaatgcctcggcggtatatggtcttcgccgtgtctcaagcacgcaccacaatggtgcagcatctttgctctcgtttatgggctcggacgatatgggcggggtggtgcgcgcctacttacgaaggtttatgctacataccgaggtttcgaccgcgatacgtcagaaaaagccactgaagaggatcgcatactcatggattaggagcaaggaaacgatggctgtgccagaaaaccccagcgcagcactcgatgccataggggcgtccgttgccgagttgcaggccagctacacggagtttttgacacaaggtggctccgcaacgtcgttgaagtgcgttccgaaggagtggatggccgctgccaagagagttgatgcagagcttctagcgtgggcggaaaatgtaccggatcactggagaccggtaaggctgataagtggtcgggatatcgatttgtccatacccacctaccaatctatctgtgaggtgtatccttcctgccaaattgccagcatctggaatctatggcgctttcaacgcctcctgctggccaagatcacactcggctccctcaatgcattctccgatctgagccgctttggccttgcatacgggcagtttgtcggtgaccccacagatttcgtcaactgccaacaaacactccaagaagtggtcgacagcgtgtgccacagcatacccttccacctcggcaaccgaatcagccggtccagtctcgccgatttcactgacccgacggttttgcttcccagctataatgcattggtagacggcacaccactagacagggaggttttcgatggcatatcgagagatgaccacaggcgccacgtcattgcgcaggggccgtggcgcgccatgcaccccctgagccgcttgttggcgctcttctcggaagatcacggcgaggtgatagcgagtcttctcagacctggacagcgggagtggatctgcaaccagttcctgcgtgtcgccacgttgctgcatcttccgttggaatcgggcaatggcatggagagctcagaatcgccgggagggtctgcggatgccaaggctgagtatctggccagggagattaggaagggggcaattcttatgagcgggccgtgaagcttggaatagtcagggcctttggtttcttttacaaagcctaaaactgcaccacggtccccagtgactaccatgaatcccgcgggggactactcttacatgattagattgcagcaacatcctcaatattcatagatatagtatattatctactgttatttgtccttaactttatagatataatattctactcaaagtggtacgatctagctggtagactcactgacaatatataatagaatatctatgggcgacagataaaaaactcttcactattgttttgctgtccatctccagccagctgagtgacatcgacaatattccaacgatctagctagccatctgagcagcaataattgccaactttctgcgccctttacacacctggtgacatttaggacagatgtagggactcttccccaccagcactttggacttgggaaaagtctggtggctgaaaactgaccgcgcacatcttcacgcgatcctatgccaaatatggtgatattggacctcgcctagtatcctcagcagccctcagaccatctcaaaggttcatcccatccattttggatttcccaaggtacgtatgaaatatttcgcctgttagaagttcttaaataaatgctctggggtatatgtaaagcaaccgatcttgaacctcgctctagggcgaaatgtacagtcacctaaaaccctgcgccacacttaacggagcatacagagaaaagtccataaagctccggtaagtttgaaacgtcgaagaatcaagaggcttaggatacgtcaagcgcaattgtacatccggtctaagtggaatgcccttcgctgcaatatcaacgcttgggtcatagagttcggggtatgtaccgaagaaagcaggatccatcttataatgtgatatcccacgatcgatatccagttttttaaacacagctcgagcgtattccggggacgagaaaagagtatcggcgtccggggctggaagcatagcagacggctgagggtcacttcctggtgtagttgaggggatattcgcgatcacgtccgttactcggatgtaggccgttacagcaggagcgcccattatgagatcggccatgttcgcttcgacgacgtagctgctgacggtgtcgcagaatatttggtcgatttggggattggctgcgtgtagtcgaatgagtcggtttcggatcgtggggaatggtatccagtcaatgacccgggggtattgttgttgtaattgtacttctgtgggtctgtattgctcgtggaccttgcttaatgtccctgtgcagggatagatctgccacgctgtcaagtcgacaatgtggtagaaacgcgtctttgcgtaccacgccataacgtccggtcgggttatactgttgaacagggaaaggaccatgaggacctgttggtagaggctgccgacaggatgatcagcagtatgttcaagggtgaatacacttcgggaaaactcacagctgtggagaaggctggaataacggtctaatgagatccaatctattcttcaataatttctgaagtacttgaatgtggtccgagaatggggaattggattctgtccaatccttgcccagtgtgacgctgaattgttggctggaggttagggcattcacgtacggctgcaggcccatctgatattcgaaagaccagatgttcggtagctggtggctcaagctatttgtatgtggtgtgagactttccagggcaaggatatcatgattgaactctggaaatgagttatcagatctcgctagaccttgattgagggtttgaggcatgatgtccacgggatcgtctagacctgacgattggttttgtatcaagatgatgtgagtggcactggaggtagatgtgtctaatttgggataatcatcggctgcgatatccacatctatgtctttaggagtttcttgtctcgaagatggtgactcagtcgcctccaccttgtctgtagatgcaacctgtgatggtttatcaagtacagacgatacggaaccagacagagcctgcatcgtcgtgataaccctagacagcttcgactggacatcaacaagctgtcttcgaagacatgcattttcctcccgcagcgcatggataatctcattctgcggtcgatctcctgagtcggcacgatcccggaggttcctcaaatactccgcctgtcgacgacgaaatgcccgctgagccaggcgattccggagtttcctacgaaatggctattgagtggtagaacatagtcatgactgtggtagaaacataccgtttctcctggtcgtcatctgtgctatccagctttctcttgctgctttcgcgggtggacctacttggactcatggcatcaagccttcttgagcaaaatttagtcaagtgtaattggtttgcgcacgaagagtcatggaggatctgttgatcagaacgagtggggattcttttaaaactagggctcgcattcccgatgtcgatcgggtttggacctcggtaatacgatcggctttgggctccatcgaacgggaatattgcacactaaactaaagccagattagtgcatttataaaatgttgtcttatagaagagttgaccagaattattctacgtctaaaataccctgtccgtgtttcctgagaatatcaccacataagttcaaatcgctaacgtgatacgtgttgccatatagcagcatcgatcaacaggtctccccaaatgaaagcacaaacccggactataataagcatcagagagacaagctaaacggataaaccctatggccccggcgcaccctccacagtaagcgtgccggtcttagagatcagatactcttcgatagcgacatctttgcctgcctccttgccgtatcctgactccttaatgccgccgaacggagactcagcgcacgaagagtttcctagacaaactgtcagtgctcaaaccataaccatccaacaaagaaagcacaacatacctgtgttcatgccaatcatgccagccgcgagactttcaagaagcctccaggtccgatcaatgtccttagtaaagaagtacgaggccaaacccatagatgtgtcatttgccatcttgacagcttcctcctcggtctcaaacctgtgcaaccccaacagaggcccgaagatctcttcctgagatgccagcatctcagaagtcataccggagatgatagtaggttcgaagaaatatccttgagggccattcggttgctttccaccgcagagaactttgccgcccttgctgatcgcatcagacacaagcttcttcaacttctcaacgccacgctcggtcgtaagtggtcccatggtggtacccgaatcagttccgtgaccgaccttgagtttctgagtcgcttctagcatcatctgggcgaacttatcgtagacacccgcttggacatagactcggttggcatgggtacaggcttggccggcggtacgccatttgaggatcatcagggcagccactgcttgttccaagtttccgtcgtcaaagacaatgaacgggcaatttcccccaagctccatggtaactttcttgagtccctcgctgcaatgctttgcaataatgcttcccacccttgtactgcctgtgaaggttaccttgcgcaccaaaggatgcttgcaaagcctttcactgacggacggtgtgtattcattatcagttgtaataacattgagaacaccaggtgctaaacccgcgcgaagagcaaggtctgctaaggccatcacactcaaaggagtctctggggatggtttaacaatcatagtgcaccctgcagctaaagctgctgccactttacgaacaatcatagcaaccgggaagttccatgggactaaagccgcactcacgccaataggttgttttatgacaaatgtgcgacggttggagactgaaggcaacgcaatagatccgcggactctctcggcctctcccgcgaaccaccaggcaaaccccagtgcgtagtctacctcgcctaaggcttcggccatgggctttccggtctcgtataccacgattgtagcgatatcttctcgggcttttgtaatcagctcatgccatttcagaaggaacttggctcgttcgcgtgggttgacatggcgatagcgttcgaaggccgcatgcgaggtctcgacgtatttgtccacatcctctggaccgttcgtggggcaggttgcgaaaacatgtcttgaaccggggtctgtaagagacaaccttggttagcaagtaacggattggtactggtagagtggtaggctcgccttcgatatcaaaccttttgttggattgggccgcaacccattcaccattgagcaatgaggcctcatggagtagggacggatcattcagctgcatggaagtcaacgtaatgtcactagatactcaaggatgcgaatacgaactgtaaatggccttggtgacatgtttaatgatagtaggttttgaggcgatactgttgtaaaagtcacagaggcataccggtggaagttctggcagcctttatatcttaagtaccatcatactaatctaataccctgctacaactacgtatttttgctcagctttcaacaatcccgaagccttcagcacaaggcttgtgggccgggtcccacgtgtgactaaccctagtatgactctcgtcatcgaacaattatgtcaacgcagaaacctccgatacattgccgattgaactacaaatcccggtaagcgttgcgtaactatcttgtctgtcagagtttactaacccgtcctctgtcatactcattttacgtgttcatttttgaagatggtcacccaccataatcataggagggccatcccagcaattcggcattataaatcagcgctttgttaagtaagtctcttattgaggtaatcgtttgtcatgtaactaggtacctgtttcgacgatgatgaagttctttcagctgcttgaagatgctctatccaaagtcttacatagatgcgaatatataaatttggatgcttccccaacatgctaaacctcactataactatcaaacgtacaaggcttttacctaaaactacacaaagtaacaatcatggctactaccacagaggaagtttacattgccgttatcggtgagtagatactccatcccattatgtagaaatccgtcctcatcgacttcatagccgactactaataaaatacaggtgccggcggagtgggctcatgtttcctgaaacaactatcatacttaagcaagacacgcccttctccccgtcttcgcctatgctacatcgcaattatcgacaaagccctccaccaccccgattactcagagatcaacatcgaaaccgccctcaacagactcgaagcagagggccaagcaccacctacaatcccctggatcatcgactatctctccggcgccccatccaaggtgatactagtcgacaacaccagcgccaacagtcttgcagaagcgtatccacagttcctacgtcgcggaatcagcatcatcactcccaacaagaaggccttttccggaaattaccaactatgggaagatatcttcagctctgcggctgccggacactcttacgttttccatgaatcatccgttggtgctggcttgcccattatttccaccctgaaggatctaatcattaccggtgatgagatcactcgtattcaaggtgtcttcagcggcacaatgtccttcctttttaactccttcgctccaacagagggccaaggcgagaaatggtccgttgccgtccacaaggccaaacagctaggttatacggagcccgacccgcgcgacgatctaaacggtctcgacgtcgctcgcaagctcaccattctcggtcggctagcggggttgcctatcgaatccccaacatcattccctgttcagagcctaattcctcaggagttgcaaggagtgtcaagtggagacgaattccttgaccgtcttccggaatttgaccagcaaatggaacagcacaaggcagcggccgaaaaggagggcaagtttgtgcgttttgttggaagtatcgatatggcctctcgcgaggtcaaggtgggaatagagtcgtttgagaaaacgcatcctatcgcggcgctacaggggagtgataatcttattagcttttatacgaagcggtacggcgataatccgctcatcgttcagggagcgggtgctgggggtgatgtgactgctatgggtgtgtcgagtgaccttcttaaagtgctttctcatattgctaggtagattggtttagttagaattcaataagctttgaagtaattacattctcactcgcatggctggtttttggaggttatgtatgtacatggctgagagcatctgttgttctagctctgcaacttttttatagacttatttatttaatttcagaccaatatgatatgaatagtcagtgtggccgagtggttaaggcgatagactagaaatctattgggttcgcccgcacaggttcaaatcctgtcgctgacgtttcttttttgactcttcagtagaaggagtcggtatcggtggggtatatccttgccaagtgactgtggagtatggacagcatattaagtgaacgtatttcctcgttcgaaaacagaagatcatgtttttgtacagcacaaatagctcaattagactccgtagtatcatgaaccatcactccctccaacaagctgtaaagcaacacgcaccaaacctatgtccaatacatgtacccacttcccgttgcagccaatctcaaaccctacgcaaccaagactccacagcaactatcattactataacatatctcgccaacagaacccatcccaaaaccccaacgccaacttccaacaatccatattcccaagcaaactactccagcaaaggcctcatatccctcataaaaatctccaccgtcttgggcccaacccccctaaactcctgcaaatgcatctccaattcatcaacactctggaaccttttcaacatctccccaaaagtcccatactcctccttgataacacccgccacatcaagtaacttagtggcagtcgaaaagtcataccggacgtaatgaccttcatctaagatctcgactagtctatcccaccctgcggccaggatagcgtccggtgaagtgatgccctcctgtacgagctcgaggaaggctcgctttgcgacgccttgttggaccggcttgccgaagaggagacatgcgaggaaccatttgaagtattctgtttctgttcctgaggagaggtcgattccgagttcgttggcttggatttctttttggggcgacatgctgggttagagtcaggtttggtgtttgggttagggttatgggttggtggtggttgcgggatgatattggtatgaggtcatgtgccacgtgcgtgagaacaatgtttcctaccataaacaaagctcaaggtggtagatattagatggagttttctagtgttagtgtttgccattctccattctttggtagtgagtagcgactgtgggacaattgaggaaaacagatatatcaggcaatttagtaagagcgtaaaggacgccagtaaagaaagagttcaaaccaacattgatgagccctcattgaattcaaatcctcaatcatcatgtcttgctgtacaagtagatagagctacaataacatcatcgaagctagccaatcagaacgtgggaagtaatttccagagtataccttcggcaatatatattcaagagttagatcaaccaacctcaagaccaatattaacaccacagaaaagaaaaggtccggggggaccgtaattgatccaagtgtcttattttctagctctgtacactggaaataagcaaagctaagaatttggacatatcgatgtctgaactttatcatagtaacaaatatcattaaccgtcgcctccaactgttgatctcattttttaccttttttttttatctccgcggactccgcggagataagtctcccttgtggattcccaacatgttcgaacgcgaataatattttcggtgagaaagatatcgaacaaagaaaaggaaaggaaatacgaaaaggggacagagagataaagaaaaattattacatcaaaaaaccactaaccggcatcttgcccttgttgcatttggcagttcctccagaagccctaaaagaccgatcaacaacttacatgcagatgcgatgcgatgcaacgtagggcaaagagcaaaaggaaatataaacccaacttctgtgactggcagatcataattaaatcgcagatattccgatgggccacagaagtaagggtgttgcgcgatcggcactcgatgaacaatttcccgtatgtaatgaaaatgaagaatgcagggtcttgggaagagacgatcagccgttgcttggctgagagcaagaaactggactgggatccatgactccagactgatattggcccggattatactcgtcctagtgacaggggtcgagttggagttccgcgatttagggcaaatgagtcaaccggacgctaatgtttttcatcacataacataaatcatcgcccttattcgatggacattcctttccacccccattgaattgaacccttgctaccacgtcagccaccacttggttaaaaataggcgccagagttgctgtttctgaaaacttcttttaaccggtttccgcaattgagcctattgccctgcatcatgggcgcacgcgatgaaacaccccagaccacgaacgaggcatcccccacgccaatcgagcccccacctgatgggggactcaacgcctggacacaggcagtgatgggccacatggtgtgcttcaacacatggggatacattgccagctttggggtgttccaagcgtattaccagagcagtctaggtgtatcctcatcggcaatctcatgggtcggatccgtgcagatcttcctgatcttcttcatcgggacgttttcaggccgcgcactagacgccgggttcttccgcccggtctactatacaggggtcctcctgcagctactgggagtcttcatgacctctctcgcgacccgctattggcagctctttctagcccaaggcatctgcaccggcctgggcagtgggctgcaattctgtcccgtaatgggattggtcgcgacctacttcgccaagcgcagggtcttcgccttggcatttggtctcgtcggaagtggaaccggcggcatgctcttccccggcctcgtcaaggccctcatgcccgccatcggctttggctggactctccgtgtcttgggcttcgtcatgctcggtaccagtatccccgctatggctttgctcaaaccccgcctgcccccgcggaggtccggccccctcgtcgagtggtcggctttcagggaaccggcctacgtgctcttttgcgtgggcatgtttttgaatttctggggcttgtatttcgccttctactatgtgggtgcattcggtcgctcggtgatcgggctgtcatattcggattcgaccaatttgatcatcgtcaccaatggtgtcgggatcgtgggtcgtctgatccctgcatttttggcgggtcgctactttggacccctcaatactattatcccgttggcgctgggcgccagcctgatgatgttctgttggatcgccgtccattcggtcggagggttgtatgcctttgccgtgctatacggtatgttctccaatggggtgcagggtctatggccatcgacactgtccagtctgacaccggatctcagcaagaccggcgtccggatcggaatggggtttaccgtggtgagcttcgcctgtttgactggtccccctctcggcggggccttgattgccagggcggatggttacattggagcgcagatctggggtggtttgaccttcctattgggtgcgttggtcttggtcactgcgcgagtgtcgaaaacgggcatgcagttgaaggctaggatttgattggagtacataagttcggttgtatttaccatctagatctgccgcggctgttgcggactattgcggggccaattcactagtcttgaggtatttatattaagattatccgggcccggtcagcgatggctgctgatcgtcgtgatccactgtggccagaagaactgctacgacaagattttgcacgcttggcagtgagattcttcgtatagcttattatgcacgagacacatcacaacatgaccccacagtatgacattgcatcggaccgccggagagcgcgacagacgtatggcttggaagatcccctctacgccttaacggctctagttccgtgacgaacataggatgagattatacaggagagcgccgattgtgacactgccaacgcgcgggacaaacttggacgccacctctaccacattagcctcgaagttctgtcgattatggttagcgggaacgattcaagacctgattctggcgaattccatactacaagacacgtaccttttctgaagaaacgttgacacagatggcgccgcgctgaagccacttcgtattcaccctgaatgcgggatctggaaccgccgagatgaccactcgagaccgctgcacggcgtcctgcacactccagttggggagatcctttccgtgcagtgcttcggactgccaaggatagtacaagcgttggaagagctggacaccggatatgtccacgctgtagacgcgagcgccctcccccgcgagtaaatgcgccagtggcaaccccaccacttcagaccggttaatgatgcagatctcttggttctgtaatcgctcccctgcgggccgtgtccgatcatgcacgtccatccattccaggatccacgcaacggctcttggcgtgcaggggataacgtttcgtcccggttttggtggtctggacacttctgcagcatcggagatccggtgcaaggtctgatgattgagtccttctacgtccttgctaggcgcgacaagctgtcggatctcgtcatctctccggtcaccgaaaatcggatagtacacaatgatcccatggacactgttgttggcgttgattgcccggatataggttgccacattcttgggtgacaatttcatcaggtggaaatgcactccgctaagcatgcgtgtcagtgatatgggttgacatccttcttggcgtactgtgtcaggcttacatctcttggcaggttttgcgagtccagtttgcgtactgattagagccagcatcatcgctggccaagacgcccatgagaaagagtcgctttggggtgttcgtcagtatttctgagatctggctatgtgcccttttggctagatcatccggctgaatagtttcgccaacgcgtggagccattgtgaggattttggtacgccttgtcggtttgagaatggagtggatgatcaatgccagtgtaagcggaagcaacgacggtagacttccgcggtctagtcagcctttaaaataccataatctagctgtaggatccagcgtcaagaagtacgcgtacacctcttgcctgcggacatcttgatgtgaagtcttccactgtctaggccctgcaatcggaccaataccatgcccaaagcatccctataccgagtcatgcgtgatcagccccaattacagagcgataatatggaactattgggatgtcgaacaccccacttcggactccgtgcaagaccgtctagccgtccatggatgtctggaacaatggaggtggcgagctaatgatctcaatagctggcccttcgtccacgtagacgtgatccactgatcttcccctccctcagcggctggcttctttactgacaacgagtcatagcagcacgcggcagcaatgctgacgccagatgtcgcagtgacggcccatctctatccatctgatggacgagtttcgaaaccccgctggctcttggcatcatctatacggagaagatcctggcatgttcgcgacacaacccctcctttggtcataatgctctcgtgtctctttctccaattgcccctcattcttcgaaatgcatcagtttttctccgcacgaaggcatataaacgagtggcctcctgctgatataaaacctccgatcaatggtatctccaccacaagagctcaacaccttctaccatgggttcagcagtatcccacccttctactccctcccctcccgccaatgacctcattgtggtaggaagcggagcaagtggagtggcaattcttcttcagttgatcgagcgagtcaagaacgggaaagcccttggagaagtaatcttcgtggaaaagaatggcctccccggaccgggtctcccatactcatcgcaatgtgaggggaccatcctcaacatgcacaccgacacgatgggattatatcacgacaaacccctccatttcagtcaatggcgcacagaccaagaaagtgggcccttcccgtctcgggcgagatatggccaatatctccaggaaacgtgggggcaggcgttggaggaagctcaacatatcggactcggggtttccgtgattcaagacgaggcacacgacattgatcgacaggctgacggtacaatgactttgagtcttcggaatggcacgcaattgacagcgaagtctgtcgtcttggcgctggggaactttacctcggtgtgcaatactcatcttatcaatttacccgggttcttccccggtccgtggccgacatcgcagctcaagacgatcccgactgatgcttctgttcttgttgtcggttcacgattgtcagctgtggatgcggctattttcctctcggaacatggccatcaggggcccattacctttatgtcgcgtagcggcagtttgcccaaggttcagggagacacgacgccgttttcccgacgctatgtcttgcatgatcttgcaaagcatatcgaagagaattctgatgagaacttgctgcaagtaacgagcagcttgatggaggagatcttccacgctaccaacggcgactggggctggctccacaatgatgaatctcctgtgaaacagctggaacacgacatccaagctgcaaagaccggcaaggttgaatggcagaaagtgctgcgaggcacagcgcctgttatcgagcgctactggaacggcctacctgcgaaaagccagcagctttttatggacaagtttttcagtccctggatgaggtaccgccacggaatgccgatacaaaatgccgagaaaatactcggtcttttgaggaaaggacagctacaggtagtccaaggtgacagagtacaatgggacggtatctataaagcacagacttccactgggcttctagaagctccctatgtgattgaagcgaccggacaggaatgccagctcgaccgtattgaatcaccactgattcagtccgcagtggagaaggggctcctcaaacctcaccctgccggcggcgtagccgtcgactttgacagcctgcgtgcatcagagggcttacatgtcatcgggtctcttaccagaggtacccatttctacgtgagtgccatcgaccgcgtcgctgcccacgcggcccggatcgcagatgccataacggacgagcccaccgcacgtcccctacacattgcaatcttcctaggaagcgacctcttctcgcacctcatggccagtacactagtaccccagctcctagccgccggtcacacgcccttcatcttcctcccggtacacaaagcaaaccgcaagaccactccgcccttcgagctccgggaactgacattctttgagcgagagctcttgcaaaaacacgtcatcccgtacttcaagaatgagaaacctaacggtgcaccacacatgacaatcgagcagatgaaagacgcttatgggatcctcgtgcaggaagtccccaacgtcaatagtgcgtcttttatcaatactcttcgaaaacaccatatcgacgtggggctctcgttgcgctgctaccagaggttcaagacagatatcatccgctacttcgcccggcccaaaagactgctcaacctacacccgggcgttcttcccacttaccggggagtcatgactactgtccgagctatgaagaacagagagaaattcttcgggtactccctccatgacatcgacgaggactgggacgcaggtgatctcattgacgttcgtcaccatcctattgactactccaagtcgatgttgcatttcatgaacgatgtttataaaatgggggcaaagatggcagttgatgtgtgtgataatatcgcccgaggaaaggagctatccaatgttccgcagaaggccgaggagagtaactattatactttcccgacaaaagaggatctggagggctatcgtaaagacggaattcgactagttgacgctgagagtattgtcaatgttatcgtggagtcgtttgcaccactagagaagcaggagaagttccgggcgcacattgatgagatcgttcaggagtggtatgataagaataggccgtgagtcgggtattggcctttttttggcatgttgttcgaatcgtggagttttggtgtcttttgctttcgattgacatctgctggttagagcgtgatgtgattattcttctaacattaacgtatacgtgagtaaatgacaacatttcccagatttccattcttttctttgcgagtagagccagtctccttgagacaatcaatacccaataacttcctttccaggttcataatcttaaatcccgccaaggactctgcgagcagttagctaccttgttagacacaaattaccacgacaattagaatccactagtgatcggcgatgatacgttgatcctagagtccgaaatgatgacacaaggacattccgtgactcgtagtccaaggtagaaagaagcctattgagtacgtatactcaatatctagtaaatccagcgaacgagttgagctggtaatggcactatgaatctagattgatcacgaagaaccaaaccaagtacatgaataggtgtccttgtatattctaccgttctttgctatggtggatcattggtatactaatagtagtataatttatatcgcttcaatgatcgtttgtacacttcctatataccaagtcacacgaggtgatgtatgggctagtttcggcctccttagcgtccgtaggtgaataacagttcacaactttcagttttattatgtcggaaagtcccatggaaaagttttcgcagggaaacaatttgctggtgagaatcttgctgcaggatgcggatagtcggatagtcggatattccaaaaagggaacgatcgctctgccgcgctggcgaaacgctggtcgagcccagcatatccgacttgttcgcatgagaattgctctaaaggccggtccggcggaaatccagattaggcccgtcgattgcctggcatattcaatgtgaatataaaattactaacctggactatatcatagcacggtagtcacccaaaattaagccaagtggaacgagcactactgaacactgaaatacctttctcagaaagtaaaaatggctccctcagcagaaccagtatccggacagaataaaccatatcgcagtggcgatccacgactcgccgttgtggatgaggaagcagagcaacctcccaagtttgacgacctttaccaggaacgtcggtacctgaaacaccgtcttgcccttgcctttcgaatcttcgccaagtttgacctttcagagggagttgcagggcacatcacagtcagagatcctgtagatcccaccagtttctgggtcaatccgtttggtgagatcgaatctatctactagccatttctacctgacgggcaaatgctgattggggccttaggaatgcacttttcgttgattgaagacgacgatctaattcgtgtcgaccactctggcactgtagtcgagggaggaaaaaataaacgactcaattacggtaggtctattagctgaccccgatctgtttcactttccggtagaagtagactaaaggtatacttgttatcaaatttctgacatcaccagccgcttacgccatccatgcggagatccatagagcccgacccgacgtcttatgtgcggcgcactcgcatagcctctatggaagagctatatgtgccacgggaaagacactggacatgctaacgcaagatttctgtgtattttggaacgaccatgtgctgtactccaacttcgctgggctcgtacttgctgcagatgagggaaaggcgattgctgcagccctgggaaataaaaaggccgcattgctaggcaatcatggaatattgacggtgggccctaccattgaggctacagttgcctggtttgtcttattagagagatgctgccaaatccaactggcggcagatgcaagcgccgcaggcactggcaggccgctggtcacaattggggaagatgaggcacgggccacatgggaagcagttggcaccataggcaatggctattttcaagggctaccgttattccaggttgctgaacgggagtttggggagaggactttgctgggtaggggaattgtaccatggaacgcagcctgagtgattagctttcagacagttctttattgaaatcatacttgacttattatttccctagatcgctcctttccctgtaagattatagtacctcattcaaggtatgattacgaaagtttctaagacaactctgatagacggcctgactagtgtagaccagctcgctgagtgcataacgaaagaacacaccgtccatgtctgttggcaaataatctgtccaagtatgaatcttctcccttaatttccagtggcaatactgggcatctcaaaatacccggtgacgggattctaagtagatggcggtgttttcctaattcggatatccgccggatgagccctatctccatcgacttgccttgttcatggcgattctgctgctttggggaccatctattggttaccccgcaaaattcaaaggattttagctcgtagttctagtgtggggttctttagcaacaatgacagtcctgggacctccttgtctacataaccgaggatggatacaaataacgtgccggtgcaactggtccgctaccaggccatcacgactatctctttggcacattcacagatacaaaatgtcttcagaagcaaaaggctccgccatacacatggagtcgactactcccgctaatctcgatattgacgggaaggatggaaatggtgagcttgatacgcagagcgttattgttgacgaggaaaccaacaagcgattactacgaaaaattgatattcgtttaatgcctgtggtatgattcctcacttgccttttgctatttccccacacacccctactctcactagaaaccgttcggaataacttacaatgggcggaagatgtgctttacgtatgcgctccaatactacgacaaggcgctcctgagccaggccgctatcttcgggcttcgagaagatttggatcttcaaagcggcttgagatactcgtgggtgtctttgatcttttattttggctacttggccgagcctacccagccagacttctgatgtatcatgcctccaccgacttgtagatcacttgggtttcccagaaagttacggtggctcgagtctgtcccatcatatgtattctgtggtcattgatagttctctgcacccccgcctgttccacctacactggcatcctgatcaaccgtttcatgctgggcgtgatcgagagcggagtatcaccagcgttcatgctctgcacgggagcgtggtacacacattctgagcaggtgctccgttcctcactctggtactcatttagtgggggctcaaatatcatatcaccgctcatcaactacggtctcggccacataaccagcggctccttgcatccgtggcagtacatgtacctaatagcggggttagccactctagcatgggccatagcacttttcttcgtgtttccagggagccctcaaacagccaaggggttcacagcggaggaacgtatgatgctcctcgagagagttcgtgccaacaacgccggcgcagaaaaccgaacatttaagtggtaccaggtttgcgaggcgctttactcgtatcatttctggtgtatatttcttctgtcaaccttgtccagcactgggagtggagcggtcactacattcgggtctattatctttaacggcatggggttctccacgtttgagtctctattgcttaatattccaattggtgctcttgctttcatctgtgtcttgggatcagggtatattggtcggaagtaccccaacgcacgcctccacacagtttcagcatcgtgtattcctgttatcgttggaggttgcatgctgtaagtcttatcaacgtgaacatcctcaccccctcattagttaaactagattaccccagctgacattcccgctctgcttagttggagacttccatcctcaaaaaccgccgccagaatcattggtttctacctgatcaatttcttttctgcagcctgggtgcaatgtattgccatgggtacctccaatgtagcaggatacaccaaaaaggccactatggcagccgggaccttcatgggctattcactaggcaatattatcggacccttaactttcgacgcgtaagccatacaacatcaactacggatcccagctaacgctatatctacagaagatatgcaccgcggtatgaccccgggttcgaggccctgatcatctgtttcgcgatcgctttggtcttgtctcaggtgttccgggcgctcatggcgctgcagaatcacaggcgggaccaaagggttggccctcctactgcggaatgtggattgcaggatcttacagataaggagaacaagtcgttcaggtatcctctttgaggggagcgggtcggtaatactagtgctgctggtaccggggattgggactatctggtttgttgggtgtaccgattatgcaggatacgacacacgcctgcaaagttgaggcgtgtaaatattggaattacacagtgcatatttaactagaagcagtaatttaagcagatagtctatgtgtgagagcgagtttgtctgtgacaaggacttcagtcgacaagacctagtagattgacacaggccaagtttatggtgaaacatacggactaggtgtactctaaggtgcaggatattgtatcatgatcttgcaactacatttacaagatatttgaaccttctgtaagcatcacacccttcaacattgacaaaatatgggagactgtcgtgtctccacggcatatgtggggaagaccggcattgggcacggaattatcccgccccctcggcaatcagattatacaccctgaggtcttcttacccacttgtcctttctctgtacaaatcatgagcgaacagaatatactcgacctcaatgtctaacaacgatacctccttaacgttccttcaagtcaaccaaacttggtctccaggacgacagagactgagacgcggctaccagtcgtgcgacaactgccgggagaaaaagaagaagtgcgagccatctaacaaccaaggatctgcctgtctaaggtgcgaacaagagctgagggtatgctccacgacatttcagagaaagaggcgaaaactccgaacctcaacatgcagcatccaggatcgaggttcacgtcagggtagaatctactaatttgaccccattctcatcctgattatctgatcgattgtctagagactactccacctggtaatgacgacctgaggccatccccaagatatgaacatggtgtaacccagggtgatttgcctgttagccctacccagtcattcgtggataggacgactagcagaacgacagacgcacaattgctcaccgtccagcctcgcacaaaaagtcggatattatccacgcatctcctggatgcatgtgggacattggatctactggcagacaccgagcaagaagagagcatccgaggagctccgttgactccttctgagcaacattcacagccaaatatgagtataaacgcgacggaggaacagctcaacgctgaacccaactaccagaatccccgagaatggaacgggtttatcctggttaagcgaggcattttgcaaggcgcagaagtagtgcattacctcgatttctatttcaagcatctgtggcccctgtttcccgttgtcccagagtatttcgcgaatcgggaccgttacatttctatggcacgagaagagccagtgttggtaatcagcctggtcgcgctggcttcaagatatcaccctttgcagggccccaacggcgaactccgatcggaacgagtccattggcgggcttggtcactcgtacagaagctctttcaatcggccatgtggggctcgactgcgatgcggaaaccgggtgccatcgcagctctgctccttttcatagaatggcattgccggccaattaattgcgaggattttgatactggcctggacgccacgagtcttttcgtatctccaaaccagccatccggtgctcaatataatactcaaccgacccatgagattggccttgattgctccgtcaatagtcatacaaatgtagaaggtcttcctgcgcggctaaacatagttgcaccagcatacagaagccacatgatgtcctggtatggcagaactctcacatagataactgcgggagtggtcactgacttctgtgataggactctgctttccactgcgatttcccttgctcaagagataggctgctttagtcaagatgttctgaccaacacgacattggcaagacggggagctgtgtctggctctgtacgattagaatggaatcggactctatgcacattcatccacctgaccgatcaaaacctttcacttcgactgagactagaaccgcagttgccaggtagccgctgcggcaatatggttgatcaacttcaccagtgcttcagccttgatagcttctgggaaagtgcaattgatctggccgctcacacagataaggcacgggaactattatgcagttggaggagtggtgagcttggcgtccagtctgctccactgactgcttcatgggagaggttcagaagagggctcgatcggtggaagaagcaacatgctcccataagcagcggtacgttgatccagccttcttaatcccatgtgggatgtttgctcattataatccagagcgggatctatcattgcccagagtgtgtctcagtctagagtatttttacatccgactctgtggtcttagtccagcagcgcatgtctttgagagttcatctggcgacgatcaaagagatcccaatatgccgatactgtcacaacttgccaatgatgccgttcagacgtcgattgatttgctgagctgtgtgacccacgatcttactccgtcaacattgttcaagtacgtcggtgtcaggtattggttgtacatcgtctgtgcctcattatttcttctgaaggtacgcaccgtccctgtcaaaccaccaatgcacccgcataataatcacattggcataggcaacgctcagagtggaggagcgactggaagatagccatccacacatcctactgatacgtcaagctgtgcgtgcaatcaagcagaatgctcccgacgacatccatatgtcccagcgttatgcaactctgcttgatatctatgttaacgccgctctacgatcttcaccctccgcggtcatatcggaagacattttccgctgggagcacgacgactccagcacctcgaactgtggccctgttcaaggctatacactcgatcaggggaacaacgtaatgtttgactctagtttctgcaactacctgccggatatggtgggcctagacgacatattcagttggcttcccgccgggagcgactgataacaaacgttaaagataaaaaccctcataaatctcgcaaagaactgctggcggcgtgggtgatccatccaacggatacatcagagcaatgcatgacctggagccaaacactaccatgggcaaaaccccttaaatctgtaaatcctgtccctcgcgcgctgcaattaccttactacatatggcgttaatcttcatatacttatcgaaattatccacaccgataatgaatggattcgaggtacgctgggtgcgatgcgccagtatatcagcatggaacagagcgtgatcggcgacttggtgattggaaagaaggacgtcaacccctctgccttggcagatatctgcgaacttatactgagatcggatcttttgttcccgagatgctgcgtctgctggcgtacccgtgccaccagatagcccagccatgtgctgtctgccttgatcagagacgggaaaaatcagcgataaacacccaggggtatgtcctggcgtgagaacgatatggaagtccactcctccaacgctgagattatctccatccgccaatattctgtcttttgtgggaactggcggggtggcattctttcccattgcagccatgcttttccaggccaattctgaagcgtacacggcgggcttgaacgtatcttgtagatattttgcgcccccgtagtgatcggcgtgctcgtgcgtgataatcacgtgtttgatttcactcccattgagtccgaaggattgcagtccgggcaataggattgccctaatctcatcctcgttgtcgagggtatcgatcaggacgatcccctcagtcgtgttgtaagcccaggcggagacaccgctgtggccaacaaagaatagaccctcaaatggcgagaaaggttgcacatacccagaaggccatgtgaaaagaggtggatagagttgctgggtaatgcattggtcttggaagtattggtggatggagccgtccacggcctgagctgccgcttcattcaggtaccgggtgacattctcagtctgctcgttggggaacgtggggggtttgaagaattgattcaaaggtgtaagctggcccagggctcgagatagccacaggctcgcaagggtaatgatgacagtgagggtgttcattgtagatggcacctggatatttgtctttggtatgtagcatcgatcccagtttatagtgggaaatcaatcctgtctttatcattcatttccgatactaaacaagtattatgataaagtagccatcggagaaatgactgaaatgacggctcttctccctgtcggatattgacaatcgggtatagcttgtcggagcggatagaactgcttgcgccgcgcaacctgccgacttcacgtcaagtgagagggaaaatgtgggtagaaaggggtgaagtcactctaatgagagaatacttttcaattgtgaagaggaacccgtgtgaatgagaaaggacagcttcccttcatcagaaagaggggaattattatcggattctacatgactcagtctcatagccatccctcggccatctcaatggctcctcctccacttctactccaccaccagatgtctcttcaagttgtgattatactgatgccagatgactgaagatcaatggtctcaactttgtagatgatgacggagacagtctttacgcagagagacgcacaatgaaagatttagaagtcgcccacatattcccccatgctctaatgtcactcaacaagggtgaacagatgatggtacgtacgattcttaatgcccacctttaggccctcacttacacagtacattctatctagccccagggcaagcagttggcacacaagctatcgaacatgttcgacccattccccgcattagcggatgggacattgaccgaccattcaatgccctcacattgactaaggatgcccatacaatgtttggtaatttcgaaatagcatttgggcatctaggcgggcacacctacaacattgactatgtcaatccacaggaattgttatccctacttgaccttcctgttacgcggatactttttattacaccggatcgaagtgtagactccccttcggtggaattcttgaaaatgcactatgctattgccagaatcatgcatatgagcggagctggcgactatatcgacaatgatctccgaagaatggatgagacagacgggcgccagctcagcgccaacggatccacccccatcgaccactatatacggttgaagcttagttttggtgaggagctatccgtacattaggtatggacggaagtgtgttttccccatcttttttactctgacctgctccatactaatctggtccctacatgactgggtaagtttacttcctctcatcttaccatcacgaggttaaaagctaaccaaaccagctacggaacaggcacagaatgcaaggaagatagcactgacacgatcgcagcccagaaatacttcaacacgacggggcgacctactcggtttaacatccagcgagggtggggaagtatggcaagtcgagagtatcgatgctgtagggataggatgcatcggagatcacgggagtagtctctgccctaacattccagtggttacattccggtggagcttaagaggacctcagtgcaacctttcgatggagaacgtcggaactgattcccggaatcttgtatatattgtgtaccttttattagttattttgggtacacgtgctctttatgtaggttgtcgcttgccaattctaaattatagttggagtggatgatctcgacttgtagttttatgacgtgatttgctggaatgtaacatgtattaattctagaatgaatgccgatatcacggacattccgctttagattgagattaaaattctgcacgatctaagttttaaactagtgtcatatcttattatgtttgtcatcactattctagacattatctgtatacaaaggaaacaacatgtacaaactaaaggctatgtatgggacaagaaaagaaaagaacccttactcaaacgcaagaggcaagcaacaaacataaaaaaaaagaaaaataaagaaaagagaaaaaaaaagcaatcccggaaaagagactctcatctcagccagccaccccagccctaacacttgtaatcaatgtaccacccagtctccgccccctgttccaagaaaacctcactttccttgtccaaccgagaccgaagaacaatctcctcagcacactgcacagtccccacggtatgcaaatggggaccctccacaccgggccaattggtaaagtccgccgcgccaatactctccccctcgaccttatccccctgccacactctcaccagcgcattattgccggccttgaagttgcgctcggcgggcacaccccaattcagcgtgcaggtcttagctccctggggcacggagaacgtcatcgtctggtcccattcggcggtggcggatttggagacgttaaggtttggggtggagatcgggtccgaggaggggaggaggtaggtttgcatcttgggctggtagattttgcccggcgtgcaggttggggtgtcattgtctggacagccgtcatcgagatcgcatgggtcgacggagcagcagccgcggaagttgtttttgtagcagcgatagaaggactttccggtagggcactgggtgtcgtcgcgggtggtgagggggaaggaatatgaggtggttgggagggcggtggttaggctcaggagggcggccagggtggcgcccagcgtgattttatggaaatgcattgtgattaatcgattgtaattaacttgaagtgtgtggaattataatgtattaacaagtatggtggttgtagaaaatggattggtgaccgtgtgtggatggtctatgtggtggtgatgcggttgagtcaatggatgtgaggatggagagaataattcccctgaacggcagatcaggacgatatatttatattccaggatcagagattagattaattaatggcgcagtggatctgaaggaatcatcgggccaggaaaaaaggaataattccaaaaacgaacacaaagggccaaaagtctaaagatagacgaggcgcaagggatcctgattcataaacccttaaacccttcccgaaactcaccgtgagccgaaggaatctggggaaggctcggaaaagggtcgagttaaggtgaggctgatcgtcgggttggcatcttcaccattggatctttgcctccgattctgtggatccgccaagtcaactaacgactggcggtctagggctgtgcacaagtcacacaatgcatggttctgcgccttctgcattttggaccaatatgacattggggcgtacacaagctactgggttgatggcagacgctgtgtgatgctgcattgtgaccttgttggcccgatctcgggtccccactgcatccagcttgtctgcctcttagtcccacggtgagatgcattagccatactctctttattggtccgttcggtaatggaaacacagaagaaccactgccaccgccataattccctgccaccatggtttcactctagatcgcggtcgtcaggtccgaaagcacaaagaaccgggataatagttctgacggtaggtttggcttggtagatccctgcggccgttgcattattactatctttagtctgacagcaagcttgggacatatacgaagcgtgacatggccgagtcaggagtaactacatggctgtgcattgagcccgcctatcaacggcggctgacatcgcctgtagcgtgtagggctcggcagtcggcctgatcactgcagatacgatctctagtgggtctgaccacgtccatatcgacttcagatgcacccttgtctgagatcaagaacaaagagttcaaggtcatgagaacagtattccgtctaattttggcattcaccagggatgtaaccatactgcgccggtgaagattctacgagctctccaggcgtgccaaaccaaaaacatagtcaatgaccatcggtgaatattcgggatgttggtcttggccgttgggggcgatatttgtgtaggaaaggaaaggtttgcgtccttatggatcataagtacatcaagctaatattttctagtcgtatctcactgccattaagagtcgtaattatattaagcacaagtaaatgaaacaggaaatgtatcgcatctattcctccggccgcccaatgtcaatcgcaaaccgcttcccttcccaccatcccagaccaaacactactccattgaaaacgccccgtttcaccaactcggtatcgtcgcaccattctgatccaggcgggatcatgtccggcttcagcatttcagagccagccaacaacgtcgcagccccagcgatgctacatgggttcaccggaatcacctccgttcgacgccccaagtagaacgccaccataatacaaagagccatagcggccagaaacccttccaggatccgggtagaaacagcactctgcttgagacggacacgcgtaggatcgacaaccgtcccctggtattttgtctcctgttctagtggcagtcgagagtttccgttcatgctctgagccataagtacgcgataaagatgctgtgtggcattgatcaccacgggtacccgatccgcctgttcgagatccgtaactgtcaatgtctcctggtcttgcatcatcgcgataaagacgttgtcgaatccatcgtacgcagtgacggtattgctcgtaggtaagaacgaatcaaaatctagctgtgaggcaaggctgtctgcgaaccgccgacttgaggattcgtctggcttggcagactggatcttgaatcccggaacagtgaatgttgtatctacatcgatttcatcaacgtacgggaaacatgtaaacccacgaatgccgtcggtgtcggtcgaattggggttgctcacgaccccatatacccccaccatctttgggcactccggcatttcatttattatatcagtaacctgaaacgtgccaaaggcagtgccgttgtaggtcgtcccattcagtggtagagtcatgctgtaccacttaatagtcttgttgtcgactttccggctactagtatcacagtcacctccgagagacaaagacactgacatggaggaaccaaagcccttgtatacagtggtttctaaaatctgactcgcctcaaggactgtacaattgaggccagcacgaagaccaggataggtcagttcaaagatgctgtcagccgtagagctctggtttgtgggcttatacgtagtgttttctttcacatccatgagcgtgccttccttcagagccggaagtactacctcatcatacgtccaatctggatatgaaagattggtccccacgacaagagcaccggtaaggcctatccctttctgtcccgagtggtaagcttgaggctccacggtcgagttgaacgagtcgtttctcaagatagacactgctcgcacatagctagcagcttcggtagaatacaacccgctcgcggcgattgtcaaacaaggtgccaggatcatagtcaatgcagtagtaaaaattgcatactttcttttgatgagtgcgctccaaagagcatgcatggtgagtttcgacaggtaattgtccatcaagctttcctgtgcggtcaatcctcctcgtctcaactccaggtatggctgaatgacctgagtagagaagtggctgcattcgaaaagagcctgtatcaagagcatgataaacgcagggatatatacccaggtgtagcgaatataaccatcggatgtgatatcagccaagccatttcgtttctgagagatctggtaggtggtctctaggcccgcaatgacaagaagagggacagctaaagtaagaattcgccaacccagcgacattgcgagaggtttccaccaggatatctggctggacgcttcggcaacccgcatgtcctctttggcatcatgcttcgtgatgatactgaaacttcgttgtccgtcaatactggcgatctctgaggcgaataggccgccagccagagatgatttcagatcctttctattcttgatgccggcaaggcgattagataagtcggggcttcgtgccaatatcgttgccatgccagagatcgtgccagggtctcgaggggtgcatttggccggtctccacacgcacatcgcccctgccaccaaaaccaaaagcgccaccgcggcttccatgagtcgaactgacaattctctcacaagtagcttttctgtggatgccgagtatacgccattgaatggcttgttcgcagaggtcatgaggtactgccttgctacctgtgcagtaattgcattgtaaaccggacgagaaatagcctccaagttcgccgcatccaataagggctctaaattgtccgcggatgaaacagtggcaatccgataaaaggaatcgagatagctattattcgggtcggctaagttggcagagaggccatgatttagttggataagtgtgcccacagagctatctgcaattgttagtgtagaaagtaacccagagacgatatcgaccgctgttacacccggaattgtgtagttagacgtatccaccttgtcagtggagttgatttctgcgacactttggttgcttttaaacaacgaaaccaaggttggtgatatcgtgtacgtaggctcacaaacaagggactggacctgtgcactgtcattcagccagtgggcagcagcgaaaatcactcggtcggtgttcgtgtcatcattggaactggcacacctctccgagaagacgttcgcatgccatccacccacagcagaagtgcttcttctgaatgcgttgaactggtaccgtgagcattccggggtgcttaaagtcaggttgaactgtgtttgttcacaatgctgggtttcgcatccctgagtccagtttttgacggttgctacttcacagcttagatcggtggagaacgtatccacggtgcctgagagaatcgtgttcgaatctaaattgaaattagatctgcgaccatcctaggcaagatgtcttgacctacctgatggcgtatcggatccgtggaaagggctgaacgcatatttgtccgtggttccagcgggatagggaagatcgagaaatttattgccgacaacaatcagcgcagcattgctgtcaatgttcgcactgttatagcccgtgccgctaaatgtcgcttccgctgttaatgtggtggggacattgctgacatggacattttgaagcatgaacaggcctgtcgaagcgaccgtcagtagcttcaaaagcaaggttccgaggactgcgatggcaacgacccagtgacagtgtttcaaggccctgaacaaagtgactacgttccagtccgaaacataatcgagtagcaaactctgtgatgccggtcttggggtttggcccatgagtttccatggcatgagttgcttcgtgcggtattccacttgcccccagactccggccacgataatcagtacttgcaaatgtcagcattgttcccctcgcattcgtaagaacaatagcctaccagcagttggaccgtacgtccatagataacggaactttgcatcactcgcacttatgccattgtttttgattgacacgctataaagcacttgaaccactatcaggatggcaataaagagcgtcgcaaatgcaacgaagacccacgggcggaggactgttggggtccacagctgggatgagctgccaccgttgtaatctttcccatgctgattggccgttagaatttcattttctcgttcagagtctgtattcctgtgttcctcggactgcacttgaaccaacgtatgattttttgagcttggattcaaccgcctggcgagcctctcgcctatggaatttttaaattccagcattgcgtccgcgacggttcagtcctcggaagacatgcattcgcacgagtatttatgtactagtcgtcagagcctcagaggcacagcgacaagacgaagagggcggggcttgaggttaaaataaaaatcgcgaggctgagttttgcaaggctacggacattcttgcccatcaatgcgagccgtgcactccaagtgaccaacgacgtgcgaccgcattggtcctttcgtttaggcatttcccgtgtttgtgggccgttgggggccatttggcagcaaggattacacgaccatgtcaatcctttctctcttcagcctctcgagctcgtcagaaatttgatgtgcattcatgatgccgtttatagaacggaccagccttttctgcggaaatgcgggaggttccgtctggagacactcgcacatcaaccgttatctaaaatctttagcgctgttctcgccggcatatggtcggcacttactatttcaattccgctgatcatgtaatcctcagcaggagtaggtatgataataaagcagagtaaaccttcgtttcatcatatttaaaaaagaagacggatatgacatgaagtacggagtacggagtacagagtaggatagaatggaaagagatggagagaaggggcagaatgagtgaccgcccagtactccgtacatgtcaggatatatatatccgagcaaccactgacgcttagcatatccccacaaccaaaaatatttgtggagaacaaacttaaccttgtcttaaaatataccctggatgatagcacccatctacagggttcttaaatcccagtatacaaagacctctcaaacagatcatgtgttcgacgcgccaagaaacgggaagcgataaaaagacttgggatctggaaaaacccgaataaaattcgcgaacgaatgagatcagatgtaacatctatccatccatatatatacactcctccgattgacaagctatatatatatacatgtttatgcgtatttacaaatcattcgctataatctataatagctactaagcgcaccgaatccgtgttgagcgaaccgccaatgccgtccaccgaggcctccgactgggtatacgcgttggtcaccgtcgacgcgccagaggtgatcgttgagcaggtctccccgttgtggttacagatcttcatgccctgaacggtctgtccagccgcctgcgcctgaatagccgagacatcccatccggaccaaccatcgttgattgtgcttccgaagtcgaactctccccaggtgcacgagtatccgccgtaatcatccgtagggagagaagaccctttcgccgcaccccaacctccctgcgagtcttcatcgaaggcgacatacttcgtttcgccggcgcccaaggtcaagttcagagccgaatgaccgtaccaaccgtccatcttgccatcggggccgatcttgttccagaaaacgatggtccagtcctcggtgttgctgccggtaaactggacgacatatctgtattggtatgcggtactggcgctgacttcgatgatgttgcttccccaggggctaccaacgttaccgctgtattcaataccgctgccactggagttggtgcgcgttccgaatccactagtggagaactctccactggagggagtggatgtccagctggtggatcctcctgagacggtggtgctagccgctggggtgctggttggtgcggtgctctcggcactgggggtaagagaaggtgcggcgacggagactccaatgctggcaccgagatcaatgctaattacatcttcgtgggtctcggcgggggtgatttcggctggtgctgccgcgacggtggtggtggtggtggtgctgctgctgctgctggaggacggagcaggggcttcggccacgggctggccggtaatagtcgtagtgacggtgacgacttccaggtcgacgacggtcttaacttccaaatctctggctttcagatccgcctcagggccttgcagatccggatgagcgggattatgcttgtgccgacgctggtggccatggaggcgagccaggcctaagtcggcgatggcaacgaacaaaaggaatgacttccactgcatggtggatgttaacgaaataaggagcgtgagtagtccagctaaaaaggagcgaaaagtatccaagctaaacgttcaagagtctaggggcgagcgcgttgcacggcgtatataacgccgccggtcgacggacaactcccccagttttccgtactaagtggagtccgggaaatcaatcgtcagcaactagacccaatatccatgatgagatgagggccaagatttgtcgctgcgtttcgaatcacaccgtcgggacgactagtcgtagtgtcgaatggatagccccaagtcggacagccaaacgaaccatctgaaacggtcccaagtccatctaagaataaaaatgggcgagcacctctggcagacacacgcattgtggcttccagtggcatctagcgcgtgttggttgttgatgttctccacaatcttacattcaggcacgaacatgccattcgtccctacgcaacggcaccccttgcgtcgtcaccttcttcgaccggtcgacgtatgtcgttgtccatgctttcgccatgtgtcccgcgaatcagaaaccttcgtcgccaatgccccagtggactgtagcatcgagtcatgtcgggattggttgtggcattttctggcgcaacactgtggctctgctgctagcatagttcatggtgggggcgaccaaatcagaggtccagactattcgacgcattagcaaaagcttgtcacggcccaggcagacagattcctgtgccacggtagttattcgcggctgcgaattaggagttgagatgtggttcttctcccttctttgctactatgacagttggagatcacgatcgatcggcagcacgtgtggcgcatactgattcagttatcgattcacacaggaatttctataagacgcgatcaagaagttgagaattcacttatgttaagccagaactcgactaaaagaaagaagataagccgaaaaatcggcggctaataaacagtgggtccggcatacgtatactcgactcgaagtccttagcgaccaatcgatgaactgcacactagtagtcgggtacgagccgttaacaatacggagaggttagattacgaactgagtgcactcttctttcttcatcaaatcgtgtacattcttgtagtacaggacttgtcatattgttggtctactcattggtacagtattgtttacaaaacatcaaactatgcaggaccacaactgtcgcgcgttacagctaaaaaaagggggtatttccgtacattcaaacctttattctttaccgttcaactttacatgtactgtactttacccacccgaaaacctttccatttctttgtaaagaatttttcttcttttttcgcccctctactttggtctccgatgatagggctggggcagtcatatgtcacgacgccgagtccagaccgccctcagttctatcctagggcttatgagacgctgttcaccacaccttgactgcaattctacttgagcatttggaaaacattctcagatgcctgggggcgatattcgatggttttccatggaaagaccggaggcatccatggatccgtggctgtcacttgcctatcatacctctaatttgcgatcttatgttaactgcagtcatccttaattttatctcacctcagatctgtttcatattctgaccaagatactctgcagtgtgcatagggttgtcaattcttttgtgaagtgtgactcgtcatcgtggtgttactagtggcattctacctgtcgatgttgatgttgatacctcatttcgattgcgagcctacacgatatagagacaattacatagataaaatcttagcgtactttattgaccaagcgtcgcgctaaggattgtagagtgtaagacgaaatttaaaaatcgaataaagtgcgattgtatctatcacaacgctggaataaacggaacaactacaacaccaagctgaccttcgaaacgcaaagtacagccccgatattacgaaagaagattcatttatgttcaaatatgcataggattcgtcagacaattatgcaagccattgttcacaaagggtgtaaatggttaaacctctccatgattgtttctgaccactgatctatccggatctctatcacccattccattcggaatacgttagccctagtcatcaaccccttcacctctccgtacctatactacgtatccgaaagccctacaacacgtctgatactcctatccatcttagaaaaagagaaaaaaaaatcctcccgtaatccccattcagataacccgatccctgaagatctctacacttctcaccttaacagtcttccctcccccaaccagtaggcgaatgaggttttccttaaaggagtaaagtaagcggcgaagactgtgagttcctgaggtggtgggggcgactatgtgcgttgcatttgatgaaagggtctgataaggggctttaagcttcggaggaatattccacgtggtgatattgctttcttttttattttctcttttttggtgccgtcgacgtggattggggtcaaggggtatgtatggtgatggagcgttgttgggtgtctatgattcaagaggtttggatatgaggctggggttatatctagtcgattggggtgcctttcgtggtggggctcgggataggaatccctgagtgactgtttatggggcgcgtgtggatattcagacttcggttatgagtcatatgtgactagtgagcttgtatcgtcatttgatttatgaattcggtataggtatgtacagagatgttcgggttaacattatatactgcaatatgttgaacttccacggcgattaatcatgcaatccataacattggtaacaatccggtacgtattctccaacaaaataatcattacaaagcaagaagaagaccagcacccgcaaggccagagagaagatgtctcgtgttgcttgtcggcaaggctgcgatcccgctcgaggatgaggtctcggcggcgccggaattcgagtcagtggcagtagctttagtaccgcccaccatgacggtatggacaatgtcagtggcggatgcgacggtagcagaggtgacaggggactcgactggagtggcaccgggcacggcgctggtaccggtgccgatctctaagatgtcatcgtctccgggagagaagttcgtgttggcaagggagatctcgttgttaccgaggtcatacacgacgtatgcactgcggaggaaagtgtctcccaagatatacatggcatcctggctgtctccactggggacaacaccgaaggcgcaggttcccaaagggaagtcctcggcaaccgctttgaggaccagttcactaattccgacggcgatggtggcgccggagaagtcgaaattcacggtataatcctttttcatgagctcgcagtcaacgtatgccagcccatcgtcctcaaggaaggtagcgttgaacgtcttgtagagctcatcaacgagtgagtcaggcagatatgttaaggaggtgcccgaatcaagcagcaccactataggcaggcgtgaggagtaatcttcggactccttgccctgttccacggaaacgccggtcaaggtaacggctagataggaatacccgcgaagagtgcgcacgatggggatggtctgaagttcgcctttgtacttggccttgttgacaccgccgaagagaatagacccccggctcgcctggggatcatttagccacaggctgtaggcgggcgatttaatggccccactattaactagggcttggggaaggttgacgtatgttttgccttcatgcgaggcttcattggtgagagtgtcataagctacaccgacgataccctctgaggaaagtgaaaacacagttagcgaggtacatttcacagatagaaacagagaactcacgtgttatcgtagttgattcggcaacgccaaattgcatatcatcaacatttacatcaccaagaccgagttcatcagtggcatagtaaccgtaggcgtttgtgccgtcgccgtatgttgcattgaactcaacacccaggttcttgtatgttgaggatgcgtcgggatcatataggccaaaaggtttgcacggattagtccgagacgaacagtaggacgagttggcgacattcacccagaggtcactgctgccagtatccaaagcgaccgcaaattgctgtgctggcgttcctagcgtcaggttcaggatgtagaaactatcatactatcaactgcattagtcatatttcacaagtcgttagcaacatggagccgcatcggcaacatacgtagtttatgagtggcaagttcagcgtcgaatctctcttctgcagaccccccgcatgttgcctacgctcaataggcagctcgacggtggccggggtatcgcgcctgtgaagcgagagggcgtccacacatgacaatgccgctaaagcaactggtaggagagatgcgccccgcatcatgaagtcaataaagctcacacttcagggctttgtccacaaattctccgatgggagtggaaaagggcggggtggtgggcaagtcttataagtcgaaattgttgcctccacttatgacaccggatggggcggaaaccccgagaggtcgtatttgggagagatacaaatctccatagctcccacctagggtgaatagcgtatatgtaacattggccgttagagtagcacagccagtcacctgcgatatagaacatcagtggtccaaggctaagcaatgcatggcaaggcagcgagccagtcaggcagaagccggatcaccggcgccaaagtcttggattagttcgtgctagctcggaccggtgagctaatagataggtgcaatctggtgaggggacagggtctaatccttccaattgtaacctccccctgatcaaatatgttggccgtcctccgtactaaccgagtgatccggagtgaaaagtcccctggtggatcggtggatgtgatcaaaagcatcccgattggcgatttgccgctttttctggagacaacccacgatcataaaaatgagtgtcgacacccttgccacaattggattgacagtcagccttgtctccttttggcatgttaggactcaggaacactttccaaactaggaaaatgaagctcagtgagtcggcagtcggacagagaattttgctccatggttcaatgactgtgggtcggctaatctccccttcggataaaactctgagacaagcttaaagcgccgcaaacttggcagtcctcataggctggcaggcgcttagccatcttggcatggtataagtacgagatagttgtcttgaaagtctgcgttgaagaaattatcgccgtctgcatccttcagggggcggcatgcaatctcccgaatgaggtcagatttttaaccataattcataaatcgtcaaactgccgaaaggggttgaacaggctctctgtccagcactcagtaggttggaagtgaggtactgtttactcttggcaccactgactcagcgttattgagacaagaccttctgtagtaccttgaaagcctcagacatttgtcacagcacctttattgagcctcctcctactaataattcatccagttataagtgaatatgtaacccaacactggtggttcgtgactttagacaaagaaagttcctactccaatcaagcttgacttactggtctcacggtaacaaaggagaaacatgcatgataccgtatacgaagtcttcccaaacttggcgtgtcggtgactgatgagtcagtccttataggattcatgtagcccattggtgtgagtagcaactatgtacgcttgactaggatatacactacattgtatatatatggtgtctaactggctgataatacgaaccttctctttctcattggattgggtatcgagataaaatactgtgttacgcacgtactgaaacctcactggagatgatgccgaatggtgtcaagttctgtacggatctcattcaaaatacaatgaagttatgcgccttaacctccatcgacgtggtgcctcaggaatctcggcaaagctgcctggaaacgcgctatgacgcaatgctgagtaatgggaatcatacccctcagcgaccaatcaggatgcacgggtaccttgccgatgacggacgatgttgaacctcctccaatctgcatcagcaacttaaacaacaactactccgggtgaagacgtctactttcaacactatcgagcttctcagctgaagattaacagtcaattccaccttttaatcactgtcatcatgttcgctgcccgccgtctcaccgctggtgttccccgcgtcttctcccagagggctttgttccacaacactgctcctgctttcgtccaaaagggcgactccattcccaaccttgatgttctggttgaggactctcccggcaacaaggtcaacctcgccagcgagctgaagggcaagggcgtcattgtcggcgttcccgcagctttcagtatgcccccacttcatgtaatttttagagtgcaattctgacataattcgtaacaggccctgcctgctccagctcccacgtccccggatatatcaaccaccccaaactcaaggaagccggtcaggtcttcgttgtctcggtcaatgatcctttcgtgtaagtggcggacggtcctgcgtttccgcgagcaactcaatgggctaatcattaacagcatgaaggcgtgggccacctctctcgacccctccggcaagagcggtgtaagtattgacactacgtgttcaattgctcatacaatcgcatgctaatgaagaccaccagatccgcttcctgggcgaccccaccggcaagttctccgaggcgctcgatgtcaccttcgatagctcctccatcttcggaaaccaccgcagcaagcgctacgccctgctggtcgagaacggcaaggttaaggaggctttcgtggagcccgacaacaccggtctcgacggtacggttccacccccttaccaaatcttcaataaactaatatctctctagtgtccgccgccgagaaggtccttgcttaagcagtaacagtcatccatacaatcaatatctaatgtatgcaaacataaaacaaaccgctccatctaccgcataatatatacatagttatatgagattgcaagtagtatctgaactgcgccggccaacatatacgatttatcgttcgcgttgaacaagtagaactccgcctcgaacatgaacaaggcttcgcctataccgaaggggtacagttcagtagatatccattgacagcttgacagtacgtcttatacctacattagggtgctccaacggcttcaatatttaaatcgagttccggacttgctgcacacaactagccaataacaaccccagctattgcttcaacaacggctgtggctcaaaagatgtgtccaggataaattgttgagagcatttctgaaggctatctaggtgagtctcccctgactaagaccgttcctctccgttcagaatagcattgacagcggtgaccaactcctccatgctggaatgagtagagagacggtccaaaataacactgcctcccgactccacgctgatgagttttgtatgtccttcgactgatctttccttgccttcaatggccatcgtaaagcggggatcaagtttatagagagcttaccgccgttgcacaatagcagagacatacatagtcgaaatctcacatatcttttatatgtccaccaaccatagcccaaaacaagtatactataggccacagccggatagcaacgacaaatgtacattaataaaaactccaacgcctgcctatatgcttccagcgcgtcgaaatacccaggatatatcagattcttcttccctctcttttcccgggccgtaatatcacaggaccatatcataaatctactgctgcaaagcttgccactgctccggggtatagcacttaggtgtccaagcatggatagctgcgatttcggccttcagaaccgagtttaccaatcggtgacgagcgagcatggtcttcttctcgaactgtggggatacaatcaccgcctggaatgcctggccacagccgcctatcaaatggaatttatattagtatatttggttcccaaattgtataaatgacggataatgcatatgccgaagcgcaaccggaggctatattcatacccgaaaggtcctcaatctcaacatgctgtgcctgcaactgctcgatcaacttgctcttcagtccctcgggggtcacccctgcggtcgcgtcggccatagctgcgtttacggcggcgaaggagcgcgcggagatcgaaaaggtctgtctctggtgaacgggggcacggaagaagtaccggcagcttctgctcaagagggtggaggtgcgggagtacatcaagtgggcggggaacgtcttgatcgggtgcagaggagattggatccggagaccgggcgggaggaagattgcgctggattcgactagaggatggtggtgggagttgaggcgcaacaaaagttttggatgctttctccggatttttgatatctaattaatgacgacgggaattaatcatcatcgggttcgtacggtatcgtaacatgaaggcttacaagtcacgtgattgaaaccgcaggttgctgactaatgagcggaccccggaatttcctaaaagagtcatatagggcttgaacctatgaaacgttgacctacgtagtagttacataggaccctatctcagtcatgctggagcttcttcttcgtagattacccggtcatgatattccccttcatattattgtaccaattaatttatacatatcagccccataaataattctaatcatctccgagagtctgtccacccttcctacccgcctcatgcggatcaaccttgccgtgggcgaattgtccttggccactgccaccgctcgacttgccagaggcgtggccaccgacggagcctccttcctggccggcctcagtcgggtcaactttgccgtacgcgaactgggtctgttgcgtgcgcttgtcaggctgtccgtcttcgcggagaccgccgtgttctaaagcaagtcagttctgatgcgggatgcataaggtacgcgagtaagaatgaggaaaaaatataccggaaggcttgtacttatcggccatgttgttcgatttagcggtcgcttttcaaagagttctgtagtggaagttgtattgtttcttggggttcttgtctggagttggttggtattgtaagggataaaaggatgatagaatggtcccttatatatcgtagctgtcgtacaacaattgcgctggccagattaatgatgcaatctggttttggtgtcataatgaccattggtgacgtccagtcgagttcatcttcttgtgagatatcatttcgacgtggtgatgacgcagcatcaccgcgatctggaaagctcgatttaatctcgcaacttaatctcgatcgatcgcgcgggacccgccataggatttacctgccatactgccatccgtctgcagccactcaccactaccggttcgagtctagaatggaaacggaacttcgattgaatgcttgaaacaggattttaaacccggctggtactgctatccgtggaaactaggtcccggcgtgtatagaattgaacatgtgccttggcatggaaccaaacaagcattggcgtacggctgtttttgcctggcttgctatgcccaaggagattgatggcgctaagcataacctctactccctttgtgctgaaagctcggtcagcgtcattgtcatgtcaacttggtctaagaaaagattcacgtaggactatctgattgacgcaatcatgactctttcctccatattcggacgtttccattcattctcaggatgactactgtatagattcaaggaaggatgtagactaagtggtatacgtagcacgaagaaaaagcagacccggtggaggtatcctgacgaagaccacgaggctggacctttttctaaggatgaatttgggacatgaactttatcaataaggaggattttcacgtgactcggccctcagcctgatcttaagtttcagaccgttgttctaatgtaagaattcctcctcggagagagagagtggcacccagcgtttctggagcatgcgcctgacatcactccttgatggatatcagccagcagcacttccccccttgatatagtttgccctcatgagactgtcgactggacatataatgcttcgcctgtgaaaacacttgtgaatgaagatcgatcaagaacgatacgccggacttaatgatgtctagaaaaaggccttatgttacctcccgatatagtcgtcctaggcagccagacaaggcaaactagacacgatggtttttgaccttgtcgttgggcagatcattgttgtgttcttcatcccccgcatttgggagaaaggtaagctgtttcagaaagtcgtgttctctgtcaagatccgcaatgtctgagtcaattttgacatcagagccaattgaggctcttgaaacccctgatgctagccgactttggaggatccagttatcaacttggaaggatgctcggccataaccgcgccaagacgcctgcaaagttcggcaggagttccttctgacactagcgtggatctactatctcgtagtaacttgcccgtctcggcagatcgttggtcattaagttcgaaacgaactactagcttgacctgtgacactggtctggccatacatagccttgttcgatgcataggcattcgtaagccctgtaagttcggcatattaccctattgtttatggacggaaacggggcacctgcctaaaagtcgaatctagagccaccaaagtgtgatcgtaggccaaccattctttgtttggtgatatccaaatcatggccgtggcctgtctctcagccgggcagctcagccaagacgaggctaacaaatatggcgctgcactccaaaggtacggagcacgatatgctgctcattcttcgtatcaaaatgcgaaactgcttgccacatatttgaattaagttttccctgtacactagttgcatataccagggacgagaaaattaaaggggtggtgatcctggagacagcagggcttaattatcggccgacttgctgcctgaacttgagacgagacctttgtttgtacttaaaacattcgtggggaatgatagacttgatgagacggatttgtcttgaccacaatttccttccatttggatgataacttgagagccctaagcaattcagggttacagaacaacaacatgggatcgccggcgatcactgtagccaccgtcacgattgtattctccgctctttcgtttatagctctgtgtttgcgtctattcgctcgatattatatcattcaggccgtcggcctagacgattgtacgtgttccattgcctgaagctctttctgtcgcactgacacgcaagattcaaagatttaatcactatcgccgctgtaagaccatcctcaaactaagtcttttttctgtgattgttgacacagccgtatatcgtacagcttttgtcatgggcctataccatatgcactgtgctttgtatgcccacgccaatcgtgtacgtggagacaagctgacaagggccagcggtacttcatggattcaaaggagactacctcacgctaaacctagaagagcttctgtcctttttcaaggtgaccacttccactttcgtgctatactgccgtcaactaacccgttgccagggtatgtggctaagctcattaatctacccggcctcacaaggcttcaccaaagtctctctctgctggttctatattcgtctaggccacgtatccttgacacgagcatgctacgcgatgatagggctagtggtggcgcaaactattgcctttgtgctagccgcagcattccattgcccgctttcgagatggagccacaatcctatccacttactctcatgcgcaaagggcattaaggcgttcacactttcgaccggcggactcaatatcctgacagatgtattgacatttgccctcccgattcccgttctgctcaaactccagatgccgtcgaagcaaaaggcctacgtgatattcattatcgccctgggattaatgtgggtgctgagcctttctttactgagttgtgttactctttctaacataaacatcagtgcctgcgtcgcatcaattgtccgacttgtctacagcaccaatttgatgcagttcccaccagacatagtttccatatctgggactttctattggacttccattgagatgaatgttgccattgtggcttcttcgattccgtcattcaaggcgatcgcgtctcgttacctcccccgtcttgttggctactcatcgagggagaacccgatgctcttggggagtagaaacggaaacgagaatcccctcccgaagccaccacgacgcccaaggcatagcctcggggcaagtattttatatgatggggaccgaagctctggattaccaacgtctagccaagagaggattcatgtccaggagagtatgattcttagcgaagtttctttcaaagtagatgtggaacgaaatcgcaatcacggttaggctttgctttactggaatgagcaaggttacagctaaaggtgtggcttttggctttgtgttatatcatatcatgtttgatacttattaactataccctagtacctgcgattcgtacatacgtatcgcatccgcagtgttgatattgccactaataaagataaaacttgcttcatggcacgtgctacaagcgaatatcatgatatactgtgcacttataccgcatatgtaagagagatatccagaatctgaatctcggattcagattgctccgggttacacctctatagcttcccgcgttacagcatctcagaggtcaggcggtagaatttagtattgtactgtacagtatttgttgtcccttagccgtagtgggatttcggtaaattgcccagacaaccgccacaaaggatcaccctggactctcttttcttctcctccaccttctccttctccaccaccaccgttacgctagctagaaaagaagaacccccactgaagccatgaaacgatccgaagagaacaagccatgtcgccttgccaatcgagcgatctctcttagatcagcatacgatacaccctgatcttaacgctttggcggttgacggtgtcgctgttcgtgtcattcccgctctcaaaccacgcttctttcaactctatccggacgcccatcttggcaagctgaggccaaactatatcgcgaacgagtttcccgagaatcctatagatcccaatgacgataatgaaaatgtacttttcacatacctcgacacggccctagctgccattgagtcccgtgatagcggtaaatctaccatcgcctacgatgaaaattcaccgagaatggcatacaaggcgtgagtactttggtctatatagtaaccctaagacttatgatgtcgtagtcactatgagctggtcccaacctgaccgctctgggagttcccaatggacgacactcagattcacgagtggcgggctaagtgtctttatgcctacgaaggtcctggtatctcgcatatcaaatgctatacggcctcggctatcattggtgatgagaggttgcttcgtggggagattctctgtctgctccgcttattcagaggacgtctgaggaataaggggatggagaatcacgtcattgccccggtatgtcatgtcttgcaaggaccgtgttttaatctagtccactgataccagatccaggttcttatgatttcgctgatgcgaccccaacatgcccgtatcattgagggatatttcgacggcaaggaactcgtgatcagtaagagccgctgtatgacttcacccgcgaggagcaggttccgttgcgtctttttgcgagaagcctatttagtaggccaattgtacaattacacctgctgttaccgcgtagtgggtatgtcctatatcattatgtattgcagaacagacttcattatcgacgaaacatttttctccatgttgccccattcagtcctaagtctagttagttaaaactctatctatagttagatttttagacataccatgttgggcacgccatatctcggtgttcccggagtctcttccaaatagagacatacgtatcacgcactaacgtagctccagtatgctttaagcgattgcagaagtaagggtgctttataaatctccttccccccttggtattaatgacccaattgcttttggcgcatttatctcctcgccctccgtgtggaacgagaaaggcaatcctagagagagataaatccacctgacgtctttttcacccatacttgtatgagtgtttctttgcccatagtgcacgctttattggccagttgcagcaaatagtaaaggccttgcctcgaacaagctcaacctaggtggacggaaatgtccttattatgtcaaggcactcccagtgacaagcttcatgcccggctggtggctcttgtccactggcggcacctctgcgccatatttcagctgttccctttacgcgattattcttcagttttgagcactttagaagcattgcaacattgatctcagttgttccatttggccataggttcttttcggcgtgtaagcgtgcctccaagaaacccgatctatgtaggtggaaatgcccttattatgtagaggtacccctatggtagaagtttctatgcccagtttgtggcggttggccccatactagttgtagtaacgttggtgatttgccatgtcctagcaaatccattcgatattgattcacgcatccgtttgcttgtaaattcagtcattcaaatgctagtgataggcgtgctcatagaatgtatttgccattgctcaagcctgtagaacgtattaccctgttgacgaaatttgttgcatatactttgttagttgctgcatcccagaaggtatgctctatctctgttgttgctgggaaagttcgtgagtcactccagtcccttgttatcgaagacaatttatggagtaggttttggtcaataatggaggacaacaagtacagccgggagtgtatataggcgtagcacatcttcagacgctcctagtttccttcccgagtgtgaagtccacccctctgctagcccagtcgttagatgaagtgttgtcagtcatctttagtgaatgtagtgcgacagatgcagtgttagtagtaatggtcaacatggtctccgcgctttccaagactgccatttgcttttcatgaagggtctcggggagatccttgtcaaacatgacatattcttgcacatgctttgagttgtagcgatggagtttggggtacgggtcccgaagtaggcactgattaaaaagccctcatggaattatctgtataggcttctgagcttctgggatgcttcttgaccatgcattacacctaagcacagattatggtgtagcgaagtgtgcctggtagacaaccttcatcttgacccgaataaagtccagccataatcccctccttttcagcatcattccccgtttgggtataacgggttgatctggttaggcaatgatgttctgggaccaggtataggttcccatccgaatcaaatctgaatctctatcagagtctgacgatgagaaagatggctcagggctgctatagtgggggggtggtgacgccaatcaggacactcaatgttctccgtcaacattttgttggcgctctgcgctgccgtcgatagggataatatgctgcaagacccagttctcattcaatacaatctggccgaatacttttatcccagacgattaagaacccgtagcgcaaatcagcctatattaggcagtttgaccttgcgattaagttagcaagcatgcaacaattatatggtgccaaagacctgagtactgaaggcaggcctaaggcttaccaagattgattgatgggttgaacgtgtttagtcttagccttacaacaatccttgaattcctgacagctttcatgcatgtcatatctggggctttcttgcccattcttctactcgcttgaggactcagtagacctccagcacgccattcagaatgagtgaagcctatccatctttggtggacgtcgtgtagctctgtaggcaggatcggtacccacagttggagttcatttggcgcccttctctctcatccatcttgctgagaaagttgtccatgcactcacctgcagcactaatgtgcagtattttcgctatcgcacgatgtatttaaagaaaatcaacagaagggctgaggcgcagagtgtgtccattcccggttcaaggcccaggcctgatagtcgttgttaaactagcgttctagggtacgctatgccgcgaggctaaaaagaccaactatgcttggttgctttgaatcaaacaagccctaaaccgatatgtagagaactttctttgatatgtctcattggcctaacagtggtcatgatggttttggagatagataagaggagaaggattggaacgatcgaggacaggctgtatttagagatagtatatggaatagcgtccgacagaaattaactactaaattgaattccgagcccaaggcagggtatccgtgaagaacagttggccgtattcatttggagttgccttcaacacatattaaaattagaacgctaaaagtagcatctgcattctcctatgggctgtaattacctccacttctccatcagtacacaacctcctgatcccgcatccaaaatctcagcgccagccagtggttacacctttcatagacccttttattccagctgtaacggatgtgcctccaagtactcttcaaaagtggaaagtctgcctcgggcattctgagcagcccaagcaaccaacctctcagaatccgggccgtagtacccgaactcacctatactttgaaacccttcgatgaagacattgaaggcaagagcgaggaacggtaagctcttcttgaactcttccgggtggacttgcttgcaggcaatggtcttgcctgtagctttagacatgacggcagcgatttcgtctaggctgtacagggctgtagcggcacaaaacgtctttccttcgtacttatcaggttcggcaaggatcgcaccaataaacttgcctgtgtccccaacagcgtcgatcaaggggagcagccccttgggagacattgggtggaccataacccaggtgccatcgggggcctgtcgtgggcgcaggaagggtagtagctggtaattctccatgaatgacccgggggagaagaaggcactcttgataggtaggcctcggatgtacttttcggctttcgccttggcctcgaacggggtgacttgggtgtacttgccgccagagatctcgctaattgctggcagagtgctgaaaataatgtactctgcaccttggtcaatggcgacgtcggcgattgttttagcactttgatactctgtttccagggcatccggaccagggatgggtgtggtcatggcgaagatagtatgcgcgccggtcaaagcttccctgagggaggattggctgagcacatcaccctggacaacttcgactttctccttgagctgctgagccttcggtgaatcgacgttacgggttatagcacggattttataccgctgtgaaagctctgggtcgttcaacacatagtcaatcactgaaccgccttgttggccagtcgcaccaaaaacggctaaggttttggacatatttgacgttgtgttggatgcgatactttctaaacggtaatttgagatactttgagtctaacaatatccttataaaagactatcatattcttcatcttatactattgtgactgaacagaaaagcgattatctcatgcgcttgaataaatccctgtcattgaagcttatgaatcgacagctgaagcttataaatcggatgggctgcttatgcaaactccttcccaccagttaccaagaaggattccctaaatttgtcagccaccacacttgcttagaatcatcttctaagctatctagcctagttaacaaattaaccaagctaatatcaatcgtaatactagtagagacttagaaggcccattcgcctagctcactatgatactcacagtcatcctgattccgtcctatgaatatcaaggttacctttgactgcctgcacataataaggtctgctactacgacataagcagactcattcagggaaggaatgagggcccagcgcgtatggcagaatttgatggcctttttaagctataattatctattcgctatcatagtccaagtcgaatctatgtgcggaaatatcggtcgaggaatccgaagacaggggtatacaaactcttacctctcatcgtgggataatacacaatgccccagcttctagacgaagttgcacttctattgtggccgttgtcaatagatagtgtctaagtctttatctttgaatctagcatgcttgcgcagagaatggtccggatttgtcttctagttaaacgaacagcgacgagctttttcagtgccttgtggcgattgccattgtgctatacaatgttgaaggaagacagaaaaatagaatgtaataaagtgtaagtatcaggaaggtaggtaactcggatatatgtagttgaggtactgcagtggacttgccaatataagcagttaaacctcacttttcatgtttatagccaaaatgactccaaaaaggtcaggccccaaacaacgagagtagaatacaagattaaaagaaaggactaaatagaagaaagctgaacacttaaatgcccagtcagaataaggatatctagttgtaatgtcattgctaatacataatgcatacccaaccatgtccactgacgtattagacatgcccaagcatccgctgtatatcaggatgttgcaagaaatcttcatgctctctcttaagcttagcggggtcattctcctcaaaccaaaacgcccacgtacttcccgtatagatctccaaattatcccgactcgacttcaagccaacatgctggagctgttgcggtaccagtgcatactgtgtaaaacgtgccatatctgcatactcctctattatgaagtctgtctgtccagtctttatgtcttttaagaacgtgatgagtccgtcgacctgttcccgtggaaacacaagacgttgtgtacagcagccgtaggtattcatctccaccactcctttcaaaggcatgagtgagtaaatccggccatgtatgtcagccccagggagctgggtacgctgagtaaacatatcacgccgattatagggtagtgtagatacgggtggccatatgccaagcgacggcgaagcataaaccctgcaaagacagctagctgtacgactaaaaagatgaaaatcatgttgcgatatgcaaagtcggataaagaccaactcattaaagtctcggtataaaagagacggaggtctatccaggggttttgcgtcgacctataagagatgtccgatagggctttcaatgtcttgaccatccagccatcagctattatgttatcttcctcgaagatggctatatagcttgcgtttgtagttgtacagattcgtagggagtatatacaatcactggtattggttcaactggttagcgactatgagaatatcccacgcggctatcaacaaccgaaacacttacaagattcccttctcgtggaaattccgagccttctccaactcctccagatggctgaattcctcttccgaggcatcgtatgagcccgtcttatcgaccagcctatctgtccatttctgtccccagcttgggttcctgctcggatccgtgtccctgaagagaatgttaagacaaagggcgctgcgctcgcgcggatccaatccttccaacaaagatccgaccgaggcctcgaaataatcgtacccatcccgtttgaccgtcgcgaacgagacgcatatagttggatccattcttgctttgacataaaacgtaagggtccgatggagcgttgtggccggcgatcaagcgtcgagcttcatgctcgcggtagaggctgtatttccactcgtaagcattgcggccatcgaagaaggctgaatgaggatctcgccaatatcgaaggcgacagaattcgtacgcagtcagccatagaaatacgattgctaggaggactttggtagcattcaatttgaggagtccccggaggatgaaatagacaaaggtcgttcgcgggggtttcatcctcaagggctatcgacttatttgcgacagccaagtagttacggcgcaaatgatgaaagaattgaggaagggcaacgcgtcctttgtgtcatatcggactggttacacggtcatgcagaaaccccgcgtaattttagcagtcaaagcctatctatcctgaggctgtattcttgcttttcctgtatgtacagaatcactttggtgatcaggcttcataagtactgcgtgcagaggacattcaattaagaaacataaacccgctttccctctgacaactcgcgatcttaccaaacggatcaaggcgactaggatatatgtgcacatttcaccacaaattaggtcctcggaagtagcctttgcggcagtaatagagaactacgaaggtgaggtattttgagatcgccgactgaaatcaagttcctacggtgtcaagcagtaagatagggcagtaggtagttcagtttatctggcttctgcagtacagccatccgcgcctatttccactaattagggtagcctagttccactgattttacaagagggacacttctgcggtaggatccttcccttatcaggagtagttctcgccagccctaagtaattctcagacctctattcatgagaagttcttacgctaattaacctgttagtgttgcgacctcctcttttcctgcctctgctattttagagtatccagcaataatcgtgatatagcgtcagaaggttatgggccaagtacaccggaaccgtttcctatcttttacaagatgctcagggctattaagattagtttactcccgtcccaagacaatactcgcccacacgccccaagaactgcttggaaatactacataaatattgttaatgccgttgcaattgcataaccacaacttccgtgttgaaaatatccaagtgctattacatgctacgatcagcggctgagacggtttgctgaaggtattctctcctacaatatccctcaactctatgccgaattccaacaacgatataaacgttcaaccttcataataaataatgattcttatccataacaaccatgctttctcgcgcatcaatatgctagtcctcagccaccttaaattctctggaaaaggttctgaacctcgctcggatcgaatggagcctggtccaccgcattgcccccgacataaaataccgttaacggcaattcatcctcactatgcaggggggcaataaatccagaatccacaatgtaaaaatcaagatccagacggttttcggcctcgttatggagaatgggagcgattggcgattctggtccaatgttggggtccagtaatgaatgatggtcggcttgccactctggatggcttcgaaggccagtccgggactggaaggaaacataggagttagttttggtgatcgtcaacaagagggagatgaaaggtatgaagacatactcttggattgtttggacagacatgttgagtatattgggacagggcttgatatatcaagtgagggtttgttgtttctgagcgtatagggatgattaaaggaatagattgagaggtagattaggaggaataggaacgccaatttatagacggataggaggggtatcagctacgatgttgagaagccataaaatgtagatctggtggggctttgatgatcggcaagctgaatatttgttgtcattaccgaaatgggtggagatccggaaatgcgactggcgagtcaaatccccagaagaaataccgcgagatctgattaaacaggatttagcagctagtgagctattagcttttcagctcagcctcgccggagtatttaggaagcctgtacttcgtcatcgcgagcgacgactcgaattaccccaccaacagccagtgacatgtcttatcttatacccactccaggttcagctgaagctcgtcaatcattgtgggttaatcgattacccacattgtttcataggcatacaagtaatttagcaagatagtactttataggggcagaatcttagcttggtaacccaatcggtacccatatgggtaatcccatttgctggttatagacttatcgaggtgtgattcccactaggagtcacctaacccactcagccaaaagactcacaattgaatccttgttcaggattcaatcggttaggtgatatatagatagggtagttttacctaggtcctagactattagacctagaactacagaagccatctacccttttgaacatatttctagatacaaccatatgaatgaagacgccactagccttggactaaatggtacaaatagtactaccatagctgaacatacgtaagacgcctccaccggggctgctcatagtaacggtcaagaaccatgatttcctctgccccccaaggtccgtctaccggtgatgcagtccgctgtttttgggtctctccacggcgttctgaaaatgactttgtagacaagcgtacagccggtgattacccagagcccgagtgtgtactggagaaagttctccgcggtaaatgtgaggccatcctatgagtagtggtgtcatgtcaacaggcgcaattttgtcttttcttgcctacgcagtgaaaaggttaacaaaagaaggatagtttgaggacatacaacaggcttcacaccgcattcaagacaacagaccagcaacatgagggaaaccaacatgagccaggctggagtcgaggaccagaatgttgacttccacccatatgtctcgctgaatagtatatctttttgggccttgggcgcacaatggaagcgccaattggtgaaggcaatgatgccccagttggtaaagaaagatgcgctgctgatagcaatcagccagttcagtactgtaacacctccggctgtgggatggctcgatggttagaatcaaataatgggatattcttccgaaggagttaaaggcaaataccctgttgggagtaggaagacagataggcagactgcaaggaagatggtgactgaacagcacgttagacatcaaccatgcccatgattgaagtgaccggatatacttacctgtagctcgagaggcaaagatccctctgcccagtacagcaccagcacattgaagaagtccgcttctgatgcgacaattgcgctccatgctattgtggttgtcagaataatgagatgtcatgtttcccttaagtgtacaaatcaagctactcagcgaaacccgcttcgaacgccaaggcagggtcaacccagagatcagcatagtcaatgtaattgcctgagacagggaacgcaatggttatctcagaaagtgactgcagcaccgcccagaccgcgctgcagaccattccgtcggcaagggccatattccctggaccccctgaggcgagagcctagcctgttgcgctgaaaacaccactgccaatgttcgaaccgagcgagataatctacatatctccttttcagtagacagaaaaggaatggtcatgcaatattcacttgttcttacatggacctggcgcggaggaaaggaacgatggaattggccattccgagcttcctgtttttccatcatcctgccgtcattcaagctggtagatggatggagcatgtcgcccatatcccgtgtcttttcgagcccaggtctgagctgaggctccgcagggagtgagtttttggattccagcatgcctatgaaatgagtttatgtcaagcagctttataaaatacagaaggtgacgatttgcatttctaaacgaagtcggggtggtcgtatgcatagattcacagcgacggtgaaactccttgaatgttcctcctgtagagattcaataagtgagaaaggcgagtatatttactatcttgtaatagtccaatggaagatgagatccactatataagaaaccccgtacatgggatccgagaagctcaggagcaagggatctacgtggcgtagtcacgcggctggccaacgtccacccttgctacatgcggcaaataaaatgggcagacctttccccagatcttcagtgtccagataaccaggggagctactgttatcttctctcggactgtatccgatcagtgcagcacggacgttacaacgtcactgtctgatacgctccgatcacccgctccacggtgtgaacatcggataggaaaggaaatgcagaagcataccgtactcactatttggcggggaagtacatcaaggccttggctttatttatatgatgaagtttcgagaaagtactctacggtataagcatccgatccgccgatccagagattagggacaagacctgcttatcactatccaatatgtatctaaccatctctcttccagacactaagcaacggcccctccttgccatagatagaattattaaggggcaatggcacttgtctgcacatttcacgcatcttgtccgtccccttcaccgaggaagtctttgctgttgcggtgcctctggcggacggtgaggcttggccaaaaccgggagccaggctggaagtacctcaaacagcttcctgccgatagggcgttctcgttcatgagaaacagaagagaagaactctcaccagtctcaccgccaccagcctccaccatttgatgtgaggggcaaccggatggactttgtgattcagtgatcggagtctactacttctattagtctgcatgtgtcactgggtgtgacccaaaaggatttggattctaaatactaataacgctagctcggaaagacatagtatataggacacaatgactatatattagtcaaccaagcatagccttgcaggttaatgtccgtcagtcagcccgcgggccttgtcgtgctccttcctctccgcgttgagggcgcaccaccatgcgtgcgttgggtctgcgtgaacaggcggggtctcatcccacggcttgggggtaagaaaatagtggatgttcttgacgcgatcgtccctccagatagcgtcatgcacaccctcccagcgcttcgtcttgagagcattgtagatgtacggaagcggggcccagcggtactggaatacctcggaaagcagagactgatcggcaaagatccaatcggcggtgttagatgtagccaggctgtcggtgatgattttccatgtaccctccgacggtctggtcacaatgattccggtgttgcacaaaccccagctgccctcgattgggggagcagtagtctgggcgagctcaggggtgtcatgctgaagagcccagccgcaattggcggggatccttttttttttagaattgtcggttagaatgggatttcgtcaaggctgctgccatagatagatacataccagtcggccgggtagtgaggcctcttgaggggattgcaaacgcatgcatgggtactgccaaacacgcgctttcccttacctcccatctctggtggatctaactcgacatccatcaactcatccatgttgtgaagcaccatcatatcacagtcaagaaggacaacatggtcatattcatacagggcaaaggcaatcagcttggtccaggcatcatatagacgtctgtcctgggtcaagtcggttgtcatcgccggcttgaggtagggaacgggctgtttgaggatgccgcgggcatcgagagcggcatgagcctcctccgggagtgagtcggtatagagaacgatgaaggggtatttcgtgtcgtgtttacggagagaatattcaagggtcaagatgcccggcaggtaggcggtgtttgtcaagatcgagcaccatactaaagcgttaggaaaagtaagaggaagagatcaaatcgcagacaatcaggacgtagtaggagtatacctttcttcgagtctgtgactcgcggacgctcaggaatgtcaaccatggctattgttttcaagatgttctatgtcttgtacataccttgatcaatgaagccgactctgagggggtttattgatctgcatccatggaggtggggtaagacgacccattgccgaatgcctaaggtgttgacccaggaagacacgggttcgaaacccatcctagacatctttaaaagatcacaaatcgtcacctagataagggatgtggatacctactaaaataggatgttaagatgagcagtctaatcagcgaattaagaactactcttcagatactatctccacccgctacgggaggcctcacatccccgcaaatatatcaccggatgaactccgagatagggttagaaacatagaatatatgacttgtgctatgtatcattgtcattgctgtctgggatttccaggctaattttaggaaaatcaccggacgatgttgcttattctagggaactaaccatgatcggaagagttccaacgattgaaccaaatcttatctatcgaacagcatactaaaggttgacgtcttgtgtttcaattgctataagctacctcactgtatagctgtggaaggtaggggcatagccgtggtacatttgaatggtactcggaaataatattccggcaatatgtcctctccgatgagtataaaatcctatattaagggaagaatagtataaagatgtctatgtacataatttaatcattcatacttagcataaagctagtattaatagttactctaacttaccaactcaatttattcatactatgttagtactgcgtatacgtccttggtagacatggttcttggtgtttaagcttagggctatgaagccctaagctgaccatcaagctgtaacacattattaaccattttacgacacacactttggttatacaaatgcatcatgcacaaagacacgatatcatgtgaagaccagcatggagtagcaaatgtccgtacgagcaaggatttaattaaaagagaacctcggcggcagagttgaaccgcggtaagatttccccattgagcggacctcctcggggtagcagagttagggtttaacaaacctccgaggtgaccggccaagcccctgttcctctatgataacccaacccctcggtgtcagaaaaggagaaaaaatgatttgcagggctcacgatgccaccaacaagttctaccgcatcagctcgccgcagtcgaagaacgattgcatgtcaaacgtgtcgtcaacgcaaagtacgctgcagcctgaatgtcaccggggtgccatgtatcggctgcactcaggaccgtactccatgtatagttacaacaaggcgagggcagaagtaagatggaagcttatgtgtaagtataagcttataggtgttgatgacagtgtattctagatctgagaaacacggtgggccggttctccttgcaaaccctcagagtcccgatcaggggcttttgcagaccccagcacgtagagtggagctccccgcgttccaagttcagccacagcaacatgttcctctgaacgtagaagccaccgcaactcgcgaagcgcatgatatcgaagatgaagagcgcaatggtgatgaaattgcagcggccgctttagggcaaccccgaagagtaggcgaaattcctttctacacaggtaactagcaaggactcacgtttgatcatatacttatgcttattgtctaactaggagatagaactgggcctgtgtctactctggatatctgttcgccggatcactctctgccaagacattgtctgatcccatcgaataaccagactaccatgacagacgatgatcgggagtacctccaaaagaaaggcgtattcaccctacctaagcccgaagtttgtgagggccttctccgtgcatatttctatcatgtgcatccgatcatgccagtaattgaagtggaatccattttgaactatcaacatcatgggcgactgggtgactgtaattttctattgttgtggagtgtattcttcgttgcggtaaatgtaagagtcttacactcgaatcacgatttaaagaaattcagttaacgttcaatatctagttcatatcaccgcgcctttatgagcaagaagggtatgtctctcgaaaagaaatgaaagccacaatgtactcacgtgcaaaggtaagcaaagtctacaacttcatctcgcctttacggttgacgtgttgatacatgtagtgcatgtacgataacggcggggagagaaacaaggtgacacttttgcaagcctccctactgttggggttttggcactcagagcaggacgaccacatgcaaccctggtactggacgggcattgcaattaatctctgccaaatgctgggtttacaccgggatccagattctttgaggtacaactcatctatcacagattgtcagagacgtttatggcgtcgtctgtggtggacctgcttcttccgggatcgctggcttggtcttactcttggacggccgcttaggatcaatctggatgattgtgacttgccgatgtcagtaccagccgacctactcagtgaacttgatagcatacctagagctatctttgcgtcttatatcccgcaagaatttcctaaactggcggagttctggattatattaattgaactgagtcaactcttaggtaaggttctggttctaaaaaatcaacccgtgaagtcgaagtcctctatgggtgagatcaatgctcttgaagcacagattatgcggtgcagattgccagaccaagatgaacatggccttactcatttggcaaagttctacgcgcatcatgtgcacctacactatcagttaagactgtctttctcctcttggcattggcagtactgataccaccataacagcgcgcttctgatcacactctaccgtccctccggaagcgaacatctggataatcttgctctaagccaacaagggtctgagcagcaacgcctgcagtctaaagccaacgccgcagcatcaaagtcaaccgagattcttgacattcttgctcgcgagaatctgctagaatatgtaggcccaatgacgtaagtcttagaaacattctctttgctcattttcctccataggagttttatctaatgtaagatagacccgcactcttagtcccggtcatgcaaacccatcttcttaactgtaaatatgccaacccactttcgagacgtttcagcttcaacaagctcgatatgtgtatgggtgtcctggaagaattgcagaaaacgtatacagttgcgtctttatttcgtgggattttcataaaagctctacaacagatatttccaacatataccgcgagctcaccgctatctatatctcatcagcctgttgcttctatcggtgatccggttgactctcactcagacactgttcctattgaaacgaccaatggggaatgtaatcaggtaattggtgacagagctgggtcatctatgcctgctggttttatcgatgcgttgatagatgagaactcaatcttcgactttttagattcatggagtgaaatttgatatcgtcaatcacaataaattcccttctttttatttcaatatataagtagactattatcgccacacactgtacatcctaccctaaatacattaacataccaccctgtgctagtgaggaataaattcgccgaggtgaattgaccgaatccgtcgtccgagggctcctcaatcgcgtgacctcattcaatatatgtactacctccctgccccagaatcaaacaactccacattttaccccagactacaaaccggaaactaggattcttacatatctacgagatttgacatccaagaatggcccaaaagaattccccaatcatcatcgtcggcgggggactagctggcttggtcgccgctttcgaactatccaaacgcgaagtccacactgtcattatagaccaagagaatgaagccagtctaggcggacaagcgttttggtctcttgggggcttgttctgcgtgaactcagcggaccagcgtcggctgggtatccaagatagtcgcaagcttgctctggaggactggttcaatagcgcacggtttgatagagaatgtgacttctggcctaggaaatgggcggaagcatttgtgaattttgcggctgatcatatggagcgttatatcaaatcgttgggggtgagttttgcgagcgttggttgggcagaacgtggagatgggagtgcaggaggtcatggtaattctgtcagtttacccagggagagaagacctgtgtcgccaaagaggtgattgaggaaacaagattccagctcacacgtttcctaggtcccgagatttcatgtttcctggggcactggtcctgccatcgtggaggctttcgagaagccggttcgcgctgccgcgaagaaagggcttgtggagttcatgtttcgtcgtcaggtggactctttaattgttgatgagtctactggtgctgtcatcggtgtacgaggtcaagtgcttgaaccgtctgacacagcacgtggtgtagcaagcagccgaaagagcatcgacacgttcgaagtgtacggcagcgcagtgcttattgcaagtggaggcatcggcggcaatgtagacttggttaagaagaactggcccgttgatcgactcgggaccccaccgtcaaacttcgttatcggtgtccctgcacatgtggacggacgcatgattgagattgcaaaagatgctggggccaacgtaatcaatgaagatcgcatgtggcactacactgaaggcttacagaattgggatccgatctggccacagcatgggatacgaattatcccagggccctcctcgctatggttggatgccacaggcaaacggcttcctccaatgctctaccctggatgcgatacccttgccactttaaagcacatatgcaacactggctatgactatacatggtttgtacttgataaaacaatcattggcaaggaattcgcactctcaggctccgagcagaacccggatttgacaggcaaaagcagactaagaacgctctaccgaatgcttggctccgcggtccctggtcctgttcaagccttcatggataaaggggtagatttcgtggtggagccaacattacccaaactggtggctgggatgaacaaacttgccaaggaacgagacggtcctcctctagacgttgagaagatcgaacgcgagatccacctccgcgatatgcaaattgacaacaagtttacgaaagatgctcaaataatgcttattcagaatgggcgcaactactggccagatcgtcttggccgggtggctaagccgcacaagctcgcggatccgtctcacggtccatttgtctctgtacgtctgaacctccttactcgtaagactctgggaggtcttgagacggatttgcacgggagggtacttcgcccggatggatcacctttcccaaacctgtacgctgcaggcgaggtctcggggttcggcggtggtggagtgcatggttatagtgcgcttgaaggaactttcttaggaggctgtatcttctcagggcgaacggcaggtatccgaatggcagaagaggtggcgggaaaggcaccacggtctgctttgtaggatgtttcatatgtgtgtacatgatgcaagaagtgctaatagatcatcctgctgaagaggcagcttttgagttaaatttcacacttattttctatgaagtacagcgtagaggtggattaagtaaacccatgacgtctaatcgctcctctcattgatcgagttttggacgcgaactttcaatagttactggaggtttccttcaatcaatcactccctcaacaatggatttggtagaccaaggcaaactatgagaaagctaacctacctgcagccccatggaatgtctaacaaaagtaccgcagttgaccaaggaagtccagtcccttcacttgtgagacatgaaaatggtacttgaatatcaacttgggtcgacaataacacctgctcaggacaactagataataatcatatcatccactcaaccatggtcatcaagcccacagtatgtaactgaaagttacatagagaaaaccatccatgtcactatgaagcattcaaacaaattggctcggggtttcatcgggtcatgtgatggtgtggctggtgaactgtggcgttagcttttcctccatctaatcgacatgatttgatatagtctcctctatagctctcggtttcaattcccacctacacaagtccgtcaaaaaattactcctcaaccccattgtacaggcagtgtagagccttctatgaacaccctcctccgttcctctgttcgcctctactcaacaatgtctgcatcgctatcccctacgtcatcgcccttcaccaaggccgtggtgagctccatgaggaaactgtatacatttctgcccttcccaattgccctcccctatttgatctgggcagcacataccacccttgaacccaatcactaacaacgcacacaggtaccccgagaccctcgcagacaaaagctgggataacacaggccgtgagcccctccctcaccaacccacctcgctcaaaccaactaacaccatctacagtcctcctcgaagcccccttcaacccaacccgacgccaaaacaactccgtcctcctagccatagacctcacaaaagctgtcgcagacgaagccatcgcgcgcaaagactccgcaatcgtagcctatcgtgcgcccccctccaacctaacgtagaagaaagaaagaaaagatactaccactaacacatccaaaagacccgatcatcttccgcggcctcaaatccctcaccttcaatgacccccagcaacaatccctcctccgtctcgcacaggaaggcatcagcgtctactccccgcacacagccgtggacgccacaccaggcggaatggccgactggctctgcgacatcgtaaccggctcagtcaccccttctccttctccctcttccacaaccaatgcgccaatcctatcctcctcgaagacttatacagccccatcctacccaaccccccacgccgtgatcccctccgaagcgagctcaatcccaaaacacaccagatcaaccatccacccctcgccgccccctctccccgagaacatggaaaccgccggaatgggccgtctcgttaccttcgactctccccagtcattaacatctctcgttgataggattgcagagggtgtcggattccccggtggcattcccatcgcgattccgcagggtgtgtctgtcgatgagatttcgattcggacggtcggggtgtgtccggggtctgggtccagtgtgcttatgaaggggggtaatgttcctgatttgctgtttacgggggagatgagccatcatgaggcgttggcggctattgagcgcgggaaggtggttgttgcgcttgcgcattcgaatacggagagggggtatctgagggctgttatgaaggagaagttggagggggtgcttaaggaggagtgggaggttcagcgtgcggaggctttgaaggcatcggagggtgatgagggattggtggagattttgaaggacggggtgtgtgaagtacatgttagtgagagcgaccgggatccttacggtatcatggtcaggaaggtttaaggaacgtcagttgtagtgttattgtctgaaaattggttgatgtggtacgaccggtagaatcacattatatgcatggaatgctatgtacagaaactagagtttagagtataccggcacggctgggatcgaatgcggatttgatcaactgagcaaaacccggatctctcccgtagtacgggggaacagtcttcttagaccccatccgttctcgccctcctccatgcccttctcactctcggcgccagtctcacttcccctatccacacgagtgacatcaaccttgcctcttgcctcatcggccccaatgatcataccctcgacgaactcgaagtcgcgacagaacgcctccaccgcttcctccgtcacactcttgacgaaggcagcactgcgcaagcgcttcagattgtctgtagcgtccatcaaggcagacgggaggaagtcatcgagttgctggctgaccgcgatgagagcttcaggttggaaggccggaagagtcgcaatgtcagccaggttaggttgttgctgcggctgactctctaacggatgtgagtcttgcttctccgtttcagtggaagatttcgccaccgacgatggggagaaaggctcaagtgctgtgagcaatacctggagaccagactcgtccagaaggtagcggtgttggatctccagtagatctatgcggagggatgaaagtttcgttgagatggggttgagatgtgttgtactgacaaaagagtattccgaaacgctcgttcgtgcagtgagatggatattggtcagatagattgcacgcgcggtagcattggatagctcctccgctgaagatgtcgctaactccaagaacggatcaaacgcggcgcggagaacaggggtgaaccggttttcgtccgaagtggactccgtatcatctgctccgaaagaagcttcgtaggtcttcatgagagaagtcaagccttcgagtgcatcgatgaggaattgaggtgtggatagatcctccgaaggagtcaaagctaggtggtctgtcgacagactgctaaccacgtctttcataagagcctcgaagtggccgaaagtaaacttttccagggtcaccaataattcggccagattggaattaggtcccagtagtttttgaaaggtcgtccggtagaaagacagtagaccaacgactttgtagcaagtaaccgggtcatcatgaccttggatcaccagctcgactcgctgacgtaaagctcgggagaccccaatcaggtcgcggttaactaagtcactgagagccttttgtccatcaaacgcgacttcctcatgctcatcaatacgagaccaaggctcgctgctcagtccagcctggattccccttgcaagctcctcaccatcagccacaaacagggcttcgagagcctcccgctcggatacagtggtcgaatgcacccaggccagcatgtcgccaatatacctcagggggtcatgggcagaaaactcgattggcttcacattgctatcacctgcagtgccggaaaccgcatccgtaagagcgtagtggaatgcatcagaaagggtgtaatcacgcgcctctgcgaagaaatccagacagctgtggaacaagctcggtcgctccgccagcacccgcagcgcacgtcggatcgagctactgatccggggatcttccaggttcagcgatttgaactccttctggatccacctgtagagcttctgatacgcggagttgagatttctggagctcttgtccatcagctccaggcccagtcgctgattctctccacctagcagagcttcgcagtcgcggtgtacctgcttcacacgggcaagcacctcgaaaaattggtcattgatggggtcctccagcgacgtcaagaccagaatatcgtcatccggaacgacgaaatgcttcgtaaaggcatcgagcagctgttgttttgtttcggcctctttcttctggttcatcaacgtggaagcctcctccaagaccggagcagtgtcttgtctagccagactaatgtgctttcgcatttcgtcacatgtctggttcaagctggtaatcacggtaccgattcgtttcagttgctgttccattcatgcgaattagcatcgctctcttctttcacattcccctcatgtcattggtaaattacctccgcaactttcccaaagtctcgtacgatctccgcattacagtcgaccacttccttctgcacatccagccgcagttgacgtcgcacttccggtgtgttatgtatgtctcgcaggctgagggtctcgagcgcatcgcgtatatccgagtccgcatacgatgcggagagtacacttgtcaaccggttcgtcaaggcactggatcgctgcgttgctggcggggacagcggagaagcagctggtgaaggtgtcctggtcgaagcatgactgggaatagccccaactgggggaaagtagctggtcatggaggactatctggtgcttcgcggagggtcaatcggcgtacggaaacggaaaggcaagcaacaggtcacgctttcatggctactttggaatgatcaatgccaagacccactagtccttatacggccatccactaatcacacctacctttggatcggatctaattgcatataccagtaaacagaactacaattttataaaggggtttaatgtcatgtaaggaacgcaaattcacgttcagtcatttaatcaagatactttcctcgcccaagtcacaagctctgggataatccgtagaactgtgaacacattacacgggaatttttataagacagagtggttatgctagagcttgaatctaatccaactagatataggagccacgtgtagggcacgggttggaagaatatctcagtatcgttcttacccggaccactttggagtaggagcacgaagttcggggtcatctctaatggcttaattgttcttttgcttaacagaccgccactacatgagcaaactcccaatcaacgtcacacatgttagcccaacggcaagataccacgtttcgctcaaacttctaccaacatccgcaagaacctctacatgtcgagccagcgttgcacgtcttacaatgtctgacaacccgccgtcttcaatagtcgcaagattcagacctgggactactcgggctaggttagtagagagctgattcgtaaatatgaattgagctatggcaacggatacggcaggaccaaggtgttgtgcgaagagcacaatagacaggcccagggagacatcgtcggtgggcagtactgtttgtacggcactgatcggtgcattgaagcctattccactcgcgaagccgtataccccagagtacagaataagttgtgcaaggtttgtatcagctccaaaagttgttataagacccgcaaagataggcattaatatagaagaaaatagcataaaccgtgtatagtagccgaccgaggatgattagtttctacagtctttcacagtttatgtgtgactcggacaggatatcaactctgtaattcgtacctaggcactgcagtggcgacaatgttggtatccagccctccaaggacaactaaggcactcatcgtgaggatggtaagccagaacttccaaccggttgggtactgttgagcctcttcaaccgagcgggtctctggaagtctgcctgccccaatgggccctaccgggttcagcttgatataagtgtgttggacgaaagtagaacaatgtatagtattgttttctaggtccatggaaaatagtacaaattgggctatatggttgataaaaggcgaacgtaagtagctgaattatgtgctacaccaaatttcaattaccatggcgtacaccctatatggatttatttgactgattatctggagtacattgagcgaaaatgcttttgcggccatatcaagaagtggaatatacaacaaccatccccaataagggtgcagcactgaggagaggactatcactatgacagggaaagacaaggaatctactacgtaaacatgcgttcgtgtgtgggcaaactcttcgcatattcctagttaagcacctacggtactaaaaggagaggaaacaacaacaacaacaatactctgaacaagctttgaaggcccgaactagccctagatgacctccacagagtggactattccgtctcaaccatagccccatgaatggctaagaagttcgcctttgaaacgggatcctccaatgcagcatatgactcttcgtgctcgctgccgatgggcaatcgatactttatgcttctgttacggtacacgtagtagtttgccttgaccacagttggcagacctctcctcttggatcctgttcgtaaactgacagtgctgattgacatcacaccgttgtccacaccacaacaattattatcacgacccagtaccaccgcccatccgtggtcatcaccttgaccactccatgcgtacactggatcaccatgcgtgcttccagcagacatatataactcgtttcctggacctatacagcaagcgttcaaatcggccacttcgctacattccacaccggtccattcctacccacagcccggtctgttatacagtgtcagagaccagctggcctcggccgtcgccagaagttgcaggacagcagcaaatgccagtgcgggacgcttcatggtgatgattttaggtctcgaattcgtcaaagctacgacaccagagtatagccctctaggaacactttttaggaatctctcatccaggaggggaggttagagacataccagacacagaaaagttgtgcagctaataacctttcaaacagatataggcctgaatcccccagacgactctatggagaaaggcaaaggatgctacagttagatgcaactcaatgcgcctgagcctttttatctatgggtttcttgtgacggcttactatagaggcatttgataagcagccctacggacgtctgacgctgagccctcttactatgcttatacaccttcaccagaactacccgacaatatgaagtaagcgtcgcaacctgtccatagtaatacacacagcggctgggcctacacttacattatccgttgcctacaccatattgcttgatcatcaagtataagccaatgaattatgccgtagcagctgtaaccgggtttgaaatcgcttacacaagaatgactattcataaaagtaagctaattaatccctgtattattctgtacacctacgtacgttaccccgcagaccgtcagattctccacaggtgctgtcagttggggagacatcagctaatattttaattctgactccaggctggggttgcaacatcagcatcctgttaagaaaactatctggttactggctttgtatgctgcactccgtttatcatgcttaagtctatactaggtatcagccctcctcgggtcgaagttaacaaggaagatgatttcgacacatggtatgagccgatcgtggtaaaaggtgaaatgattgatcattgcagccttcctggctatttcatcctcaaggtctgtttattgagagtcttaccaatgacctattatagagataacctgactgcgtgcaaatagccagttgcgtacgggatgtgggagaaggttcgctcttggctggccgaccatcttcagcccttggaactacaaagtttctctgtccccatcctcccttacctaggtgatagggcccaggctccttatgctgtgtcagggtccagcagtttcccgaatgctgagtccgttatctatccttactgcaggaagtggatcaagagtcatcgagacttgcctctgcgaatgaaccagtggtgtatcagattccaacatgaacaaaacccacagccactcctccgaagttgtgaatacctcctgcaagaggtccattcagcacatataaccaaggacagcgctcgtcaagaggccgcacagatccttgaactttatagtttactttaccgggatctccttgccatccccgtcgtcaaaggatataagaatgcagcttatctccaggacaccgacatcagtactggtgtagttatagcatatatacctgctacaaaccagtgcatagagggtgcaaagtgccatgaatttggccagactttgagtaaagcgtacgaaatcacagtgagagacccttcggcaacggcagaaccggcggcgctccttcatgtctggcaaaactgctggcgtatttccattagagccctcggtgttatggtggccacccacagtgacaaccatggccttgttctgccgccccgcatcgcagagacccaagtcgccattgtcgcagcacaagcttcttcgacagatgagcagctaatattggacacagagactgatagacttgtttcacgtctatcatcagcaggaattcgtgtcaaagttgatgacttggaagggtactctttgggatggagatttaatgagtggatcgtcagcggcactcccctattcatagtattaggcccaaatgaagtcaccaatcaagtcgtgactataagacgaagggacctactccacgcagagggaaaggttgaagccgcaatcccagaattacatactatcatacccaccacattagccaacatccaagaagagctttatcgcaatgccctcgctaaattccaggcagaccaaacgcggattgccgacaactgggacgactttattaagagcctctacagggacaaattggtatgtctcacaccgcattgtcgacaaaggagctgtgagctatacattgagggcatgggcagtgatggaacagaccaggcgcttggtagtcatatcaggtgcctttgcgttcctctggagcagccaggagctactgaggagtgtgctactccatgcatcaatccgacttgcaagtacagcgccctgaaatgggccatgtttggttgtaagtacagtcccggcaaccctatcattcctttacgttgtttttctttgccttcatacaggatgtcttaaggaacatattgcttaccttttcccttttttctactctagatgcttactaggaagccctctatggtcggaatcatgatattacaccttccccacggaaagccgctcgtttcaacaccgacaaaccgatacgtttaaacattattgattggaagttcatttctgaggagtcacgacaagagctagctcgatgtaaatggacatcggcactggtggtaataccgcttcgttgaccaccgatgaacacatgtccaggtggagagccaggccagcaagagcattgcgttttgcgccgtgggcttggcttctaattggagcatgcgaggtccggtgaagcaaactgactgtatattatatggtttacataacctatatgaatctaattttgaaccagagtttggttgatcctatcgtatatataacttaccagcttagccattgtgtattgatttatcccacatagtaatgcattattctcgcttgatatttttgcctatcatcacaccttgcctggttagggcgctatcctgccaactctgtgatttccagttaatggcaagagtagaaatacttacgttgcccctatatgcacgtgagaacttatgcagcatacgatgagatagtctgccgtcatctggattactgttcctatgcactaggcgtactcattgcttacaatgcaattcatttcgcacagcaagctaatattgctcttactgttaccacaactcccggtctcaaatgcttagcttatgcattctattgcggcttactgttcgttatgatcggcttcaccgagattaccagcgttacgtacatgtaccatgtagtccaagtattaaagagcatgcgaattctgtagtatagttactcagtcaacttggctcgatcacactgtccggcgttgcacccctgtgccactgtctttcgtccaaccttgagcactagggaacagaaataaacctccataggcagcgaacgtagaatgaatgaatgaatcaacaaggtatccccatctaaactacctcgcaggtacagagtagagcactctatacgattccccgtttcatcaataatcctctatctctatgaattagacaaaaggtaaatagctagcatggaccagcgccatgactttcgcttgcccaaacttaagagtgaagggctttgacaatgcgtttcaatccctcatcgagctgaacacggtgttgagaaaaggtgatgcggaaccatccgggctgctcactaccgaagtcatcgccaactccaagatgcactttgtgcagggccaacttttctgccagctccctacttctgttccatttagcagagtcgctgtcatcagatggacggttgggttgggcttttagataagctgttaatagatcacaccagacaaagaaccctgcgtttgatcctcttgcgtggggtattccgtggttatccaggaatatgaccacatagttgtaagccgcagcaagcttctcacggctttcctcgatatatcggtccacgaactcttcgtcttcaagaatacttgtcgtcacatagtctgcgaagccagaaatcgagctaaactggccaacccctctgatcgattcaagcaagtcgccattgttttgggaaataatcacacctagtcgcactccattcgcgccaaaatccttgctaataccccaaaggacatgaacaagcttcgggtcaatcactccatcatagttgatagaaagcactgaggtaaaatcttctatggtcgttgccccatcctgaccatgtctccaaactgacaaagcatatatctcatcgctgatcaaatgcacgccgtgtttttgacaaagcttcatcagccccacaaggaacgacggaggataacatcgacccaagggattgtgcgggttgcagagcataatggctcgtatagtacagccttgctcacgggagcttacgatggcttcttcatattttgacacagcagacacaccgacaggatccatctcgtcgaagctgactggaacgagcttagcccctggccgcaggcagatgtctctgctgaaatctcgataatacgggcgcccaaccagcatcccttcacctgggtcacacaaggcccatgagcagtgctcggtcgcagatgaaaccccattggtggcaatgatctgcgatggcttcagcgcttttgaagggctgagataacgagtgagaaagcgagcgatagcagttttcagccggacagaccccgtgatggtgtcgttcaacaaaaggtgtcgtccgggaagatcgaagttactgttcacgcgatgtagcagctgttcttgcatcaaagcattgtgtccagcgccgagtgtgacatagccgtgagggttgctctctggatgccagagatcgttcagaatgtcccagaggccattgcttgtgtctctcagcgaggtacttgccctgagagacagggaatgtgcaggtcggctggcagtaccatgaggcacgccatcgtgttgcgcaatgggtggataaggcatgctgactggaactataagccttgaagaacactttgatctgtcagatgccacaaacgtataatgttcctgtcagttttctgagctactcaggtcattgaatcgattcttaaaaagtccatttcagcggtacgtgctacataggggttcttatatcatctacaggagtgagtgaatcaggctttgagagggatttactgagagcccgtggccttagatgtcatcaaggcctagttagggcttgtccaaattggtgatttagaaagtggggtctcttgcgcccttccaacaacatccagacaatgactcatcaacaataggcttgagcggcaaaaacctccgcttacaggaatcctttttagacccaagtcttacaagcagaggggggcgaagctaattgcattatgaacggattttaaacacttatctgattgaatatcgctacaatatccaccagtatttcatcgccatcacagagggaaacccccatgaagagccgtcgggcgagaacagcccaaaatattatattcctacaacagaaaagacaaagcgtattattgtcacatatagcgggaataccagtctttgatatacgctaggaaggaggccaattgccaccgagtcagaggggatttagtcggttcctgcgcgaaaataaaatccaggacctacattacccaatgcctccatattgtggacataagatctgataataacctagctcatgccctgggctgttggttatatgagtacaatagttcattaactagcgcaagatgtataacagagtgtagtacaaactcaagctgttcagaccctactacggagttgggcactaaatgagttgactagttctcattatcagcgtatcacgacagatctataacagtagaaagccgacaggatgtatcatgatctactgctagtcggctgggtatcttaaataccggatgattcatgaaccttctgcacgatcaatcaacataaattaagctgggtttaaggtggggccaaatttgcttcgccccatgtaaaatcacttcccatccaggaaatggcaatgagtcaactgaagcttgttccaatgagcctgttggagtgggcatgcaaagggagccgaaaatgtcccggctgtcctgagcacacaaacacgaacgagaagcggacgaagagctatatcattgtaggagatacgtctctctttacctcgccccacaacggtcaccatcggacaacagctaggcgatgacaacgggagtgatggcagagtcaaggtgtgcagcaggattcagtacgtactttaggtgatcggaagcaggtgacagttagcaccctggcagatagtatcttcttccagtcggaaacttgacaagtcgattaatgtcttgaaattcacccaagacacctctttagcagctcacagcgagatgaagaaggcttctcctaacaacatgctccggataatcgtgagctttttatatattactactacgttcttagatacacacaataggcgtaagcactgctatgatgaactacatttctgtttctcaggctgtatagaagtccttagtgtttgatagccaggaactagtcaacgctactaccgagctaacttttatccatacgtatagagagatgaagttcaccaaggcctctacctactctgataaagacctaggtagagggcagaacagtagaattcaacgtgccctattatgatgagaatgtgcattttacacagccttcccgattgtatcatagctggtctcggaaacgtatattatataaaggaattgctccgtacgggtttgagtgtgtgctcctctttcctcgatatctccatcgacccaacagtaatttacttcgccactatcactctgaataatcacacttttatgccgaattaggctccattgagtttaatgacctgtttgacctcgttgagtgacatgtgtcgccatacgtgatactacctagaacccaacatcgcatcaaccggaaacggcggatttcataatctggcagaaggtcattgtgcaatacctgtacaataattggtgcaaaggggataatgaggcttccttgtatcaattaagcactggatttgattaggacttgcttgtgagggttctaggctaactccggctttgagtaggtgacaactatattgtattccatgacattgttcaaaccacagacaggtagcatgggaatatcctgccagagtgccttgactggtagggatgtgaagaaaagtacacggaaacagaacgaggatgtagtagtgtagatgattccacttagggttcacccctcaggacacgcactttcgtgctcaccccacgcgccaggccgctcacaagtcggcctaaagcggtaaagggaaagtcaatgtgcagtcactagtggtttgttttattcgtccaacgaactgccgttcactaaacctcaacgtcaaaatattagcaactctaccctagcgagtacctttccaattcttatcgcattttttcacaaatcaaagacaagattctcacgacttaatcctatccattccaatattcaccaccaatggacagcccccttctttcccccgccaaagcgcgacaagcagccatccaagcaaaagattgggcctacgtcaactcctggctaagtcgccaatacgccccgaacccagtccccacattcgaacgaaacgaagatacgctacgcacattacttgccctagcggcagccaacgacaccgccgacgaggaagcggccctcctacaccaggcacgcgaacaagccgtgcagggattcaaagcgcgcgaagagacagaagacaaacagaagaaggaaatactcgatgagctggaatattgtctcgacgataaaggtggacaggatctggatgatctggccaaatcggccgcggcgttgggtgctctggacgtggaggcggcacacctgggtcaagccgttgtcgacttgacgaaggaggaatttggcgtgcaggaccagctggataaggtggatatgttacatgattatctgcagagggagttggaggcgctgcgccggcaactggatgaacttaggtcagatccggcgtatgaggttccggctgatttgccggctaagacggttgagtggacgaaaggtacgaaggttctcgctgctaaagttaatgaatatcaggatagggttgctgctttgaagaggaatcaaagcaaagggcctacgttgggtgaggtgctggcggaggaggaagatatcaaaaagcttatggataatgtcaagagtttggaacatcggcttcagttgttccagaatcttcctacggatgtacaaggggcgcgggctaagtatcgagagttattagaggaactcagcgagcttacccaagaacgagactcgaagcttgatcaatccagacgggagaagtgaaatggttcagaatttctgattaattcatatggtcattaattgacacaggatactaagcttaatacagcacatgaggattaaatcatcaaatcataaaagtattcatgatgaatggtcacaggcgatcctccacagacttgagcttagtggtcaccgagaccgacggcgttcttggccttgtcaaggctgcagaatcggttagtcttttgacaattcgaatactctgcatggatacttacatcgactcgccggcaccgccgtggctcttgttgtcatgcacacgctgacctttgtcgaaggcctcctgtgtgccagacttctgatcgtcgggctggaagccacgggagacacggtcaccaatatcagtggcgccctccttcaccttctgctgagtggacttggcggagtcaggggtgagctcctccttggcctctgcggggatgttagcgagacattcactgcagcatcgtgtttatgcatatcgacatactggtgctgaagtccttgcgtccggtgtcagacatgtttgcgagtggtttggtaaaaggtagaaagtggttaaaggagtagtaattggtagagtagttgtgatttgtttgtttgtcttgtcgaaattgatgaagaaggaagtaagaccaaggatttgatggtttatatatctttcatctgctgctatatctgtccctccatgacgttgatgaccctgatttgctccgctacgcaattcacccgaggcacatggatattgagtctggcctgtgaatgtgaatccagaatcgtgtccatgggacgaagatcatcgactctccgtcatggtgacgagagaacccgccaatggccatcaactcagtcatacaattggcgattccagaagaaagcaggactgggtgggataaacaaatcgatctcgtcattcttgcgagtctagatttctgagccgatgacgtcgccatgacctacagtataggctatatgctagtccggaactggcctagcggatctggtgggtcatggggaaatataaatccgtcggattatctattccagcggatgccgagatagcaccttctgttttcagactagtgttattctcagccaaaggtggcaagcggtaaataatggcagtaccgtgacagttgttcaccgccacgcggcgagtcattgcaggcggcgagtctccgagtctccgtgcctaacctaacctaacctaaccaactctctttcttccctttgtcaacttgccttcgctttcaatgcgtttggcgtgaacatcgtcggtctggttgggtctcaatgaccaccatgttgatgcgctttatctttatgccctatcttttgcgtttgaattgtgcacatttatagttgtctttggtactcgaaagctttctaccctttctgttttgcaaaccccgcgtattgccaccaggcacatccctactacgaacggaattctacaccacattgtagctgacatccaagtccattgctgtcaatgccatcgtcggctacatcttcttcgaactgggatttcactccggtgatcaacctactgcgctcgccgacgtacagcagcggtgaccgttccacccctgctcgccacaatgactcccaccaagctccatccactcccggcacggttgctgcccaaggtctaaatgactcggcacccgatctgaagcacgagagcggtggacccccaaagcttggtgatttctcctccctatgggatttccttggcaacaccacgcctcctgtcggggcagaagctggacttcgtcaagcgaccaaggaaagcattgtcgaacaacctccacagcagccgaagcggattcagatactcaagcgtccctctcacggggacaccaacgttgatagcccggataaaacgcttccgcgtacgcctcctcggccgatccccacttcggatgtgtccaagtcccatgagactaccgtcgaatatcgtaccacaaaacaccgtaaccaaaccaagcaaccaacctatgagcctcacttgtcggaaggcactgtggaagcagagtccgacaacccgagcatctttgattcgtcttattccaaacggcgcgtcgtttctttcgtcccgtctcaggtgggcatagcggaggccttgagtgagtcgtccgagaccccgccatcctcgtttgatgaagccgatggggctttagcccctatcgctatccaaaatctcccggggggcgccatccgcgtgcagcccgttgcgtacaagtcggcagccgatcgaaaagtcggtctcttaaccaagctgttgaagaactttcccgactacgcagagactataactcgagttggtcgggctgggaagtccaaaccgggttcttctacatgtcgcccgattcatgtctttgtcgatatgtctaatgtaagttatctttcccgtaagtgtcggtcaacctctgctgactatcgctattggccagatcatggttgggtttcacgattccatgaaagtatcccgaaacatccctgtgaaaacacggattcgccgcttgccactctcattccagaacttctcattgatcttagagcgtggtcggccaacggccaagaaggtcttggtgggctccgaccgcttcgctgcgatcgacgacggcgagaaactcggctacgagacgaacattctcgaccgagtgcataaggtgaaacaaccgactcgtcgtcagctgaaataccgcaaaggtcctcgggcaggcgctcatgatggaggcagtggttctgaaacgaacgacgcaccggaagagcgctgggtcgaacagggggtggacgaaattctgcacctgaagatcctggaaagcctgttggatacagatgaaccagcgaccatcgttttagctacgggggacgcggcggaagccgaattctccggaggattcatgaagatggtagagcgagcgctgcggcggggatggacggtggaactggtgagcttctcccaggtcaccagctacgcctatcgcaagaaagagttccgctcgaaatgggggaacaaattcaagatgatcgcgttggatggatatatcgaagagctgttggacatgtgattcggatggtctggaaccaggaacgctctcctttaacctttttgcctctgagctaagatacctttagatattagtagtggggccatcaggcatattttcgcaagccctatagtcaatcaaagttgtcgctctcttttacatgtttgatatgtagtctagaccgtagtcccgtgagtcacgccgaggggcaactcgtatgcgatgaccccgccttccagtcaaaagtcgataagctcaccgcccgccaacgcgacgagacgtcatgtccctcattggcccgaaaagcttcaatttccatcccaaagcagaaatcatcttcttcctcatcttctcctgattatacaacaatcctccttcatgactcacggcattctcagaagatacctataaagatacatcaccatcatctagagaacaccaacaccacaatcccttcaaaccacacccacaacacctccaacgcaaaaccacctaccccgcatcacaatatatcaaccaacaataccccccccaaaaaccgaaaaacaaaacaaaacacaaaaccagaaaaatgacaacatacaccccccgcgacttctacggtggcgcaatcaaaggtctaatcccgcagaactgggtcgacgcaaggtccgtaacccctatccaacaccctctatataagccacatacacatacacatacaactcccctccaacataaccccccccaatcaaacaatctcagaacccacaactaacaaaaagagagaaaacagtaacgtccgcgaaatcccctcccaccaagaagtctacctctcccgcacaaccctaacatcccaaatcaccgaaatcaaccaacgcgtcacagaccccgagacatcctctctcgatactctcataaacacacaactccaatcccagccactcaagccggacgcaaaagcagccctgtaccatgtccacgacctctgcgatgaggacgataagttggagatcgtgacggcgccgacacgggttattttgaggaaattcccggctggggttgtggggtatcggggtgttgtgagggttgtttctcctaaggcttcttctagggctggggctagggttgggtctggggttgggattgggggtgcggttgccgggtcgagtgctgagggggagttgactagtactgtgacgttgtggtatttggtggtgaggttggtggagcaggagacggatttggtggtgtttgttaatgtgccgagggaggagtttgagagggctggggatttgagggggttggaggcggaggaaaggttggctgaggggttgattgatggtttagtacaggagttggaggttgttgattggggtttattttgttaggttcttttcttggggggttatttgaggttgtctgggtgtgtatgattgagttatggatttgggaatattggttgggattgactgtacttgggaggattttatgggatctgcttgtttgcatggtggatttggtatcaatgggttaggacttgcatacgttatcttggatgagagggattgagactaacacggacatgtatatagatagactaattagatagcttagtgatagtcaatccgaaatcaatcgattatgagcttcagagtatagcggtgtatatacaaattcatatgtgctcatggcataaggatcgttgtgtacatgaaacaccaaagacaaatttcccaaatgagagacggacaggcatatcatcgctaaagagagaacaccatagatatatcgtcatcaaatgaacgctgaaaatgacaggcaaatcttcccgaaatgtatgtagaatgagagacaaatccgtaaacaccttcaatgactttgaacagccgccagtacctcagttgcccaagctgatctcccctagcacgttcgcgacctcgtcgacggccactttctcggaatctccaaggggctgtttctttcggggtgagacactccgtggctttggtttgatctgctggagcaggcctttgcatttcccacatcgcgacttggtagtatcgatgctctttgaatgacgtccatatgtctgaccgcagtccacacagctccatacgtacttgtagtcgattttgtagctgtgcttggtcgtcacttcgaagcgtccgccatagacagggtggtccttcagagcttctttgcacttcagcccccattgcttaaagcttgctccatgggggttattgtggacgttggagatgataaagttagccaggtggcagtactcgtgagctagcgtgttcagcaagcgatcctcgtcatcaataatccgttcagccagttcgatactagcatggtgcttggatagagagcctccaggcgtctggggctctgtcccaagcgtaccctccgttcgcagcttctctcgcttccagttcgcccgtccagcggttgtctgaagtgtcttgctccagatgatctggacaccacccgtttcctcggctatttcttggatacggccaccagtaacgtggtcatctagaacctcgaagaagtcttctgcgacagcggccttcttattatcaaacgacttcttgcgctcaagggcggctttcttcttctccatctcggcctttttcagggctgtcttgctaggaggcttggctgccttctttgttgttttgtttctaggcatgatctcggggtcaacctcgttatccgactcctcgagttcctgcagcaagttgtgtaatttgcgcggtgaatgttggtcgatccaatcgtttgtggcttcctgggaccagaaagcatctacgctctcgcgatatggtgtgggtggaatatgcgttttgtcttttgaaggtgatttgagagtggttttagaggggctggcaggtggtgtttccaaattcgccttttcggcctctgaggtttgcgagcgaggctcaaaacctcctagaaagctataaacagtcaatattttatgcttttaaatatgcagcagcgttgagacctacttttccaaatcttgttggagttgagcggacgggtcatattcatcagcgtccacttcatcaacagcagctacctcagcagcagcctcctcagcagtatcgtggtcgacctcattatcgtcaacgccagcgtcaccgtcctccatatccagacggctcatcttctcatcgatattagaggtattacggaatagctttcttggactggcctggtggtcagagggcatcgaaacagcagctggtaaagaaggctctagacgaaggcttgtattcgccgagctctccagggccctttttatctgttcctcagggttcagccttctgccccgaaccagtctccttttgactctcggcggcgaaggtgccctcttcgtctcttccggttctgactcactggcggatgcctcgtggcggctaggctcttcgctatcactaacaatgaagtcatccagagagttgaacccatcatcactttcctcatcttcggaccgatttgccggttggcgataatcccgaaactgccggccattttgtcttctagtattcgtctgccggggttcccttctggtaggagaccgccgcgttgaggatgcatcagatgggttccgactgatagaggaggtagtggagtaatcctcgacaacctcctcgacggggtaattctccttggtgtaatcatagagctcggacttccttgtcgaccggctcctagagtgtctcgactgcggcatcagcagcgaattagcacgtgccaactgcaacgggtcactaggacgtccttcggtcgaagagcgcgtagtcgaggagcgcatagtcgatgcaaaggagacatcgtcagggtcactcagtccatcactgtcggaaaagatattgaacgtcccactggataccgttccgctccgttgcagctttctctgtcgttgaacaggcttatcatttgtcgtcgttctcgccgtcggccgtttgaactctggttcgtcgaataatgtccccgagtggtctcccaccttgggagtgggcgacgtatctctgaatctgctcgagaagaccgagttggtattggacttcagttttcggactgatttggtcgcattctcgcgggtgccgccttgtttgacggggctcgttgggttgagtcgagccattgtcgttttcgttggtatatagatatctggttttggtgatatatgattgtgctggtttgctttggtggtcggagtttagtatgacatgtcaagtacccggtctgttgaatataaccagtgccggaaatataagtaaagctggatggagatattgcatgagctcgagctgctttcgagcggtagtgttgacgatattgagttgcagctggcggagggtcgttggcatggcaacgcttcctgctgatccgtgggttgcaaacgccatgtccaaggcaatgaatattccacgtctccttgtggagcaatagtaggagcacaaaaggaaagagaaaaaaaaattaaaataaaatagagtaaaataaaataaagataaaataaaaaaaggcctaacgtggatcgagcgggatctctctcagttatgttatcacaacaccaatacagtctaaaagaccactttatatactctaagtctacatcagcgtgccatatctagttgtcatctcatacgtctattgttgattaactatcttgtagatctgcatgactctccatgtaaagctaggtgtgttccctgtgttgggcatgttcccgtgtggatgtatatatccgccgaaaatatatatccgccatctacttcgggtatggtacacaccagctgtttattagtatacgtagtctataaccctcttaatcgaccttatactaccaatcaaggtcactgaagctatgaaaagccagccgtatgatcaacgaacccttcctcccatccatggtgcaggctcaagcggaaacggcgaagcgatcactatgccactcaacacggtgtaaatcccgcaccatgttattaatatgctgctcttctctatccgacaccaattaatccaatcatcgaggtttagcatatgtctggactagggtagattgtgtaggactaccatactgttcgatcgagcagagtcgtgtattgaatatacctcgcaggaaagagaacgcggcgcttgtttatcttggatgtgccgattaccatatagataaaaaatactagaattagagatttaaggagtctagataggaaagccaatcataagagtcctctaacagtgtcatctgaccctaggactggtcatacttacgtgaagtcacccatgaaaccaattgacctattaaaatatataaaagacgatgccaaatacagtatacctgcagtggtaatacttatacagcaaagaagttcgtattgagaaaggcagattcaccgctaggatgtacaagagtatcgatcacaccgacatgtagcagagctaacccgcttgcacactgatcggcaggaaatggggctaccgtcccaccatgaggcgagaaggagcgaacggcccctacaggacgatcatgcccgcaccggcgaccatggccgtcaccacataggcgccgagctggaagataccaacgttgacgctagaaggagcgaccaaaccgccggcagatccagagctagatgcagcagcaccatcggaagcaccagagccagcagtaccagtgggagaagatgtaacggtgccggtaccggaagtgccggcctccttgaggagtgcagagcaagcactgccgccgctcttcgagctctgggtggtagcagccccgttgaagtcacaagccttgtcaccgttaccctttgctttctggttctggtagtagaggttgattgcgtacgacagttgctgctgaggagtgcacacactgtaagcgccatatttgccagtggtggcattggtggtgattccatcgcagacgtcgtagccgcaaacagtaccgaagagcttatctagctgctcgccggatactttgtccttcagagcgcagcttaggctttcctccatgcaggagcagaggtcttggtttggagagggaggtagtgggctggaggttgccagccacttgtcatcgacagtcggacaagactgaagagcagtgtttgtcggctgataatcgcccttcttggtgccagagggggttgcgctagccaactccttcgacaggtagctgaaatccgccttagtgctgaccttgttgccatcaacagacaccaggcctagtacaatcagccgataagttataaagatagccaatgtcgaccttaccatagttattctcttcctggaagtacatatacacaatacctcccgaccagacatcagccatcttgtctccgtaaagagcctggacttccgtgaacttgcgaggctgaacagcattgcaaccatactcagcaaagaagacagggacagtgtagtccttgaactcctcagtacgagaagcgtacccggacttctcgtagttggagtcaccacaccaagagtacacattgtaaccccagaagtcaatactgtcatccgcgccgttacagttaaagtagttggccatgtttttacggatgctcgagtcatcgctagtagcatagccaacacccatagaacgatagttcttggccttaatatactgcttcgtgtcacggacagcagccttgacaaaggcactggcagacgtggtattctcactgttggagacctcatttccagcgaagaaaccaataacgttcgagtattgcgacagctcatcaaccacggtcacatatctattgtacaggtcgttatcccactttggttcgttgcgattaatagaatcacccggggacgagagatccgcaatgacatagataccggcgtcactgagaaggctcatacactccttatgatcggacttaggatcgatagcatacacgcgaatggtgttagtgcccagcttttcaagataaggtacatcacgcttgcaagcatcggcgtcggcaaggggatccttgaaactgttggcggaagaatcgggaccagaatactcctcttcatagtatgttagcttatgtcacaccgatgatattagggacagcgaagaacccacgctggtaggcaacaccgcgaatgtaactggggttttgttagcacaaagtgaagaaacgggatcgtcaatagagggtctacacacaactgtgtgtcgttgctcttgtagaagaatttagagcccttgatgatgatggggtctaggtcagctgcaataacactgctggcgaagagtgaggcgcccgcgacaatactggacaacttcatgttgaatgcgcggacgaggcgttgtagaaactattggcaagattgccagacactcaaaagtttggagatagaattccacttgtactaccaaggccaaagatgaatagtttgaataatgaatgacgggaatagatatttgaaaccaagatattaatgcttagaaaagacagcaagcgagggaccatggacaaggaacgactggaatctatagacgaaaggaaagtaatgatttaacggcgagaaaatcttgcgcatctaacaacaaagacagtcgccacgaggacgtccctgggaccgggttctctgcatattcttctataggtttgaagtgggcactcagggtcaagggacttcagggacaaatgcctcaaccgcccgcttctctggagccacgagaggcatagaacgggacgggatagccagacacccacaatgaccttcctctaaggatatgataagtatgatgatcattggtgatagtcagtgatattcctgtctggcggctgtcatttgtccaagcgcgttgtgcagggatgggttgatatcagaggcctcaggaacgcgcaatcccggtccacaacggaaacagatcagaggggtcgatgctgtccaagtgaaaagcttaacggttcacccgcctataaatgatatatatatagagaagcttaaacgagacactgacctcgaatctgtcccacagttacgaccctgaccacatcaccatcatttgcatgagaccgtctggggtatccgaccatgctgaagctttgggaaaccatggcttagtagtctgattaagctcagaatgcccaccgcgatggacgtgcgactgtaaacttgtatccacctgatgtggcggacacgggttgatcgctgaatgcagaatatctgtcacttgtcttttgtttgtggctcacttaacccctctgtgagaaggcaacacatgtgtcagtacacatcagctcctacgaagcgtcaacataatgaattggagcatgatgaatccagtcgctgcatccggaatatgcttgcatgcagggtttccggtcctctagagaatgttgatctcaagagaatcttaatattgtgtaggcaggagccccgatccattgattgtggcgaagcatcatctctggaattgtgagtggcaggcagcgattgtagatccatattccctttgacggttgaacgtccctatgacgatctttccttctccgtcagtggatcagggtccaatatgaaacctcttggatgaatagacacttacggagtacggctagagaaacaagcttatctaagtcgaaatcttttcccacgcctgtgtatgctcggtactattcactgagtgccagcatcatccaccgagctctaatgcaagaatggtaaccacgggccaacggagtccaagtcatatgaaagtcacgcctcgatgtttgctgggattgttctataaattatattagtaatcgcggtcatgcgagtgtaacgaaaaacaggaatcaggataggtgtaaccttacaccattacaatgagaaatagcaatgacgacgattgaaggtaataattattatctatcgattggatattaaggaattaccggctaatgatgatcctcaaaagctgaaacttgaaagcccccctttttttcctttccacaccttcgaccgagggctggaccattggaagccaatcaagcagaggccgttgtggtccttgccggtttgccacccgcaggcttgtggctcccggttggccagtcgtcacgccagcccccctcctctacgatttaaacagaaaaaaagatcaaatccaactcagccacctgtttacggattggtcaagatcatggttctcttagtgaaactggcgaatcagtccatacctactgtagtatggagtactactaagtaatatgaagagggtgggtgcagctgtactttctaggtaatactgtaaataatccacactagagaaacgttcatgaatacctagtaatggactaatggtaaggctccattctcatttttgcttattccccccgaattatttctagaaaacaatagcgaaccctacggcggggggtgatatacgtagcccaattcatacaacaacccactttttccactccagtcctatgtcggagtagcttgtagaagcggaaagaagtctagattacgaaccagaagaaaatggaaaagcttgataaaagcgactgtagttggcatactctgcaagggcaggggtatgaaaggtccacttatcacttgtttccgggcgcatatgtacgaaagtacctgtctgttctgcacgtagaaacgagaagcctctgacaagagttcctgtaccaaaagtccgatcgaagctctttaaattcgccactttgggggttttgaacaagctcggacaagagaaaagtaaagaaaaaagaaaaaaacattcagccactggttcatagcagatacactggaaaaggaaatcggagtgttcatcattatagtcgcagttggttccatgggttcagaacggagagagatctcagcagcgattatcgccgttccgatatttttggaaactttcagcttgcatgggttggaaacttggcagaagtcgcattaccgatgataacatcacttgacacgcccctgtccacccctacctaaatatatacctatactatctgaatattattactagtagtatcctccccctacctctttcccgaggtagtcgtccatgccatatatagagttctcctatgtcctgagctctgttgattcatccataaaccgtagattttatgcccgtattgttatacataaacagtacacggtatacaatgaggtggggcaagtggaattgattacagagtagctttaagccaatcactacatcgcatgagatacaaagaactgggcacatgtgcagctcccatggaaccggacaaagcgcattatatttatatcattcaaatgtacctggtttagaaaggaaaaaaaaggaaaaaggtagggaagaaaaaagaggtggaaaaagcaaaacaagaaaagaaaagaaaaaccaaggttacttatcaagtcaaaagtggggttcgcttcaatcctcactggtctggtgctcctactccgtatatacgatatggtttggactactagtacatacagttggcgttcgatatcctggatgattgttggctgcaggaggagctagtaaggtttaaggtaaaaccaatgaccttcagtaatcaatcttattgcaacagcaatcggaattaatcatacagagaaaatttcgaagtatatatacattacttgttttatccatatcgaccgtcggagtataagaatatcaaatatcctaggcggaggacaaaacctcagctgggcacaagggcgatagagcatcgttttccgaagatatttctgaacatattcactcttgagtccaaggggtcccgacccaatggatacattcactctggaggatttacaaagagccggggcaaagggttctgtctaaatgccattgtacatgccggtgacaaatggtaaacaatcggctttcaattaaggtgttcacatatttgaccgtaactcagggacctatgggtctacccccgcttttcactttcctccattgaacatctgttcttgtagaacgcgtgtggacggtttagtagattgcctttagaggttagcccaggctgtccgaagacatcgaaaagctagtctattctatcgatcttgggagctgtgcatgttctaccaaggtagacgccatgcttcctgtcagcggcattatagccgccccaagggtaggcagcatatttccaaaaggttatgcataggcaccggaaagtttctaagttatcatgtcacctaatgattgaagtagaaagagatacatatggtctgtcgttctatgtctttacttccactagtgcggtgttgtctaagccgatatatataatagtagcctgtgctgctaaatttaacatcggcctggcctgtcttgatcatgccttgcggagtaagtggcaggtgttttaatatatgattttgtacttcaattattggctgaatatgtgctacacagtgcaactctagtggcaatgaagagtaaaacactcgagggccctgtatcccaatccttcatggatttgacggtgggttgtcggtggcaattctaaataggaatggaagaacggatttaggctggtaattgacattacctgattcacggaccaacgaatctactctagaaagtggcctcaacaatagtacatacatagtacatacataataggaaccatttagaaggcattgataaaaagaacttctattatgagcacgaagtaaatgggttgttcaccttccccaagtgtgttgtattgactattttagttgattgctctccctatcaaaacacccagctagggccaccgagagcaatgggtgtgctttcctttggttattaggagttggttcaggcacagaaatggacccgtggataaaagttttgtgtaccggagaacctccatcggacgtacgtatgcgttggtgatagtcgaaagagctgaatcataataaacaatgtgggcgtcgactgcatagcgacgcgttcataacacttgcgactaacaatcgccgtcgtagtggcagcatcaattcaaagttagaagtggaatgagccaatgccatccctgcatactttccagtggtaaaacagaaaatagaaaagagaaaagaaggaaagcaaagatacggtacgtctggtattgagttgtaattgtagtaggttatccgcgtggggcctattcgctgaggctggtggtggacccggtttcaggggggccgccgccagcttccatggattccggacggtcgcaaccaatgatgacttatcactgcacaactaaaatttggcctcttcaaaaaatcaggttgctcctgctggattcaacagtataagcccaattttgaaccgttcgagaggagggttgcgccccagcggtttgcaaaatgtaaaagttactaatcggagcagagtttgcaatactgtatcattcatctctctggatggatggtggatagcgaagtgtggaagtggtgaggggcgggccgaaaacagtactacctctacgtaccgtaggtacgtaaccaaaccggtaccgaccgtggtaccatacgttcatacgtggatggatgagttagactcaatgctgtggatggaatatgcgtgtatgtaacttcaaccttagctgaggtcgagtaattctctttccagttgatagaaccttagccaccaacatgtatgggccaataattacagggggcgggagggcaaccttgagaaagcttccaatcaggaaagactggtgatgtgtccagatcatggacgatttgatgattaatgtctcctaataccagagcggtatccaggcgccgggtgcagtaataccaagtaatgtggtatggtccagtcagcggtgcagagtaaacacttttccaccgaaattttattccattgggtgtagtctctgtcccgcgaacagaattgtgtatcaccttaccagacacggagaggggggaaactgttgcctcccgggagggtatattgtgggtcctttccccccgatacaggtaaggtacggataggcaggtactgtcgcgaagtaaattgagcagatccagatcccaaaataaccaccaggccccatactcaccagtatttttcctattccctgctgggtttggggtggacaatcgattcccttttcaccactaatcgtccaactcaaacactattctctctcctccccccttcgaccatcgcttgggatctttcctttcctttcttgtcccttcactttcatctttgggttcctgttcactcttttattgatttacacccaaggaacgattgttgttttgtgctttttctttttttcgtttcttctcacctgctcttcttttttttttcacgactttttgtctggactcctatccttcttttctcgctctcgtttgagaaaaagaagagggaggttcgtcctagactgagacaggttcgggcctagtatcagtctaggttcttgatccgtctttgcatcgttgctcgattttcctttcccttccattcgtttacaagaacactttagtgacgaccgtacggctcttcagcctatcgaaaagtgcgatttaatcattaattatcgaattgatcgaatttcagcattaacgatcggggactggtgcctcaaagcggctcgtcggcattgcgatcgttcacggcacgtcgccatttatcctgttccattgcagctctcgatactgagagtcccgttgatgcaaaaatattgagaatcgatcaatttgaaatttggatgggtcactgttaaggtgagtcgattgacgacactcttcgaatttatggatttgcttgcgtgccagggctaagcttgtattagaaactatcactgcttggttacactcgcctttcaacatgtcaggctacaatcaaggcggccattacgatgatggctacggccaacatggtggccatggggattcctattaccaggatgagcatcatggccaggcttactatgatcccaatgactacggcgatggttactatgatagagggtacgtgaataattctgcttcttgctatgcctgatgtgtaacaagtgactgatatgtggcagcggttactatccggatggtggacatggttacaaccaggacggtgggtactatgacgccggccaccaggacgactactatggcgagccttactatgaccaaggaaacggccagcaaaggggacggcgccgcggcgattcggaggaagactcggaaacattcagtgactttaccatgagatccgaaacggcacgtgcagcggacatggactactacggtcggggggacgagcgctacaacagctatgccgacagccagtatggcggacgtggatacggctaccgcccgccctcctcccaggtctcttacggaggcaatcggtcgtccggggcatcgacccctgtctacggcatggactacggaaatgctttgcccgctggtcagcgatcccgggagccatatccggcgtggtcctctgatgcccaagttcctgtttccaaggaggaaatcgaggatattttccttgacctggtcaacaaattcggtttccaaagggacagtatgcgtaacatgtacgaccaccttttgacgcagctagactcgcgtgcctcgcgtatgacgccaaaccaggcactcctttctctgcacgccgactacatcggcggtgataatgcgaactaccgtcgttggtacttcgcagctcaccttgaccttgatgatgcggtgggcttctccaacatgaagttgggcaaagccgaccgaaagaccaggaaagcccgcaaagcggcccagaagaaggcgaaggagaacccggagaacgtggaggagactcttgaagcactagagggcgataacagtctcgaagccgccgagtatcggtggaagacccgcatgaaccgcatgtcgcagcatgaccgagtgcgtcaagtggccttgtaccttctgtgctggggtgaggccaatcaggtcaggttcttgccagagtgtctctgtttcatcttcaagtgcgcggatgactactacagttcgccagaatgccagaatcgggttgagcccgttgaggagttcacttacctgaacgaaatcatcactcctctttatcagtactgccgcgagcagggctatgagatcgcggacgggaaatacgtgcgaagagagaaagatcacaaccaaatcatcgggtacgatgatatgaatcaacttttctggtaccccgagggtattgagcgaattgtgctggaagacaagacccgtctggttgacattccaactgctgagagatggatgaagctgaaggaagtcaactggaagaaggtgttcttcaagacatacagggaaaccagatcttggttccacatggtcacaaacttcaaccgtatctgggtcattcacttgtgttctttctggttcttcacggcctataacgctccgactctgtacaccaaaaattaccagcagcagctgaacaacaagccacccggttcctactactggtctgctgttggcttcggtggtgccctggcatgcttcattcagatatttgctactatttgtgaatggatgtacgtcccgcgacggtgggcaggtgctcagcacctaaccaagcggctaatgttccttctgttgatgtttatcatcaacctggccccgggtgtggttgttttcggcttcaagaagcagatcggcgaaacaattgctcttatcataggtattgttcacttcattattgctctggtgaccttcttcttcttttccgtcatgccgcttggtggtttgttcggtagctatctgaagaagcatggtcgtcaatatgttgccagtcagacgttcactgccagctgggcacatctccagggtaatgatatgtggatgtcctacggtctttgggtctgtgtcttcggtgcaaaattggccgagtcttatttcttcctgaccctgtccttcaaggatcccatccgtattctttctccgatgcagatccagcggtgctctggtgtggaataccttggaaccaagctgtgttacattcagcctcagatcctgctcgggctcatgttcttcatggatttgacactttttttcctggatagttacctctggtatattatttgcaacacggttttctctgttgcgaggtctttctacctcggtgtttctatctggtcaccatggaggaacatcttctctcgtctgccgaagcgcatctactccaaagttcttgccaccacggacatggagatcaagtacaaaccaaaggttctgatctcgcaagtctggaacgcaattatcatttccatgtatcgcgaacatttgctggctattgaccatgtccagaagctcttgtaccaccaggttccttctgaacaagaaggtaaacggactttgcgtgccccaactttcttcgtatcccaggaagatcagtcttttaagactgaattcttcccacctggcagcgaagctgagcgccgtatctctttcttcgcgcagtccttgtctactcccatgcccgaacccttgcccgtggacaacatgcccaccttcacagttctgatcccccactacagcgagaagattctcctgtcactccgtgagattatccgtgaagatgagccttactcccgtgttaccctacttgagtacctcaagcagctgcacccccatgaatgggattgtttcgtcaaggatacgaagattcttgcagacgaaacgtcccaattcaacggcgaaacggagaagactgagaaggatgtcgccaagagcaagatcgatgatcttccattctactgcattggcttcaagtcagcagctccggaatacactcttcgcacgcgtatttggtcttccttgcgttcgcagaccctctacaggaccatttccggctttatgaactacagccgtgccatcaagctgctttaccgtgtcgagaatccggaagttgtgcaaatgttcggtggtaactctgagaagctggagcgcgagctggagagaatggctcgtcgcaagttcaaaatttgtgtttcgatgcagcgttatgccaagttcaacaaggaagagcgtgagaacaccgaattccttctccgtgcataccccgatttgcaaattgcctatctcgatgaggaagcgccggaaaatgagggcgatgagccccgcttgtactcgtccttgattgatggacactgcgagcttctggagaacggaatgcggaagcccaagttcaggattcagttgtctggaaaccccattctgggagatggcaagtccgacaaccagaatcatgccattatcttctaccgtggtgaatacatccaggtcattgacgccaaccaggacaactaccttgaagagtgtttgaagattcgtagcgttcttgctgaatttgaggaactgacaactgataacgtttcgccttacacgcctggtctcccttcgtcggacacccacccggttgctattcttggtgctcgtgaatacattttctctgagagtgtcggtgtccttggtgatgttgccgctagtaaggaacaaacattcggtaccctcttcgcccgtacacttgccgaggttggtggtaagctgcactacggtcaccctgatttcctcaatggtattttcatgtgtacccgcggtggtatttcgaaagctcagaagggtcttcacttgaacgaagatatttatgccggtatgaatgctatgatccgtggtggccgtatcaagcactgcgaatacttccagtgtggtaaaggtcgtgatcttggttttggctccattcttaacttcacgaccaagattggtactggtatgggtgagcaaatgctgtctcgagagtattattacctgggtactcagctacctctcgatcggtttttgtctttctactatgcgcatcctggtttccatctgaacaacatgttcatcatgctctctgtgcagatgttcatgatcgtcctgatcaatctgggagccctgaagcatgagaccattacttgtagatataacaaggacttgcccattaccgaccccctgcgcccgaccttctgtgctaaccttgtgcctatcattgactgggtcaaccgctgtgtcatttccatcttcatcgtcttcttcatctcctttgtcccactggcggtccaagagctcacagagagaggagtttggcgtatggccactcgtctcgcaaaacatttcggctctttctcgttcatgttcgaagtctttgtctgtcagatctacgccaatgctgtccatcaaaacctgtcatttggtggtgctcgttatattggtactggccgtggtttcgcaaccgcccgtattccattcggggtcctgtactcacgtttcgccggtccttccatctacgctggtgctcgattgttgctcatgctccttttctccacatctaccgtatggagtgcggctttgatttggttctgggtttcactgctcgccctttgcatctcgcccttcctgttcaaccctcaccagttcgcttggcatgactttttcattgactaccgtgattaccttcgctggctctctcgcggtaactcacggtctcacgcgtcttcttggatcgctttttgtcgactgtctcgtactcgcattacgggttacaagcgaaagctcctgggcgttccgtctgagaagggatctggtgatgtccccagagctcgtattacgaacatctttttcagcgagatcgtcgcacctttggttttggttggtgttaccttgatcccttacctgtttatcaattctagaactgggactatggacaaggacagggatccgaagaatgctattgcccgaattgcgattgtggctttcggacccattgctatcaacgctggtgtcgctggtatgttctttggtatggcttgctgtatgggtccaatctttagcatgtgctgtaagaagttcggtgcggtgctagccgccatcgcgcacgctattgccgttatcatcttgctcgttatcttcgaggtcatgttcttcctcgagggttggtcttggcctaggtgtgtgttgggtatgatctcggcggctgcaatccagcgtttcgtctacaaacttatcatctcacttgccttgacccgtgagttcaagcatgatcaatccaacatcgcctggtggactggaaagtggtacagcatgggctggcactcattttcccagccgggtcgtgaattcctgtgcaagatcaccgagctcggctatttcgctgccgacttcgtccttggccatctgcttcttttcatcatgctgcctgctctctgtgttccctacattgacaagtttcactctgtcattcttttctggctgcgcccaaggtaagttgaactcctcgaaatgccccctagattgcaatagttttctgactcaaaccttagtcgtcaaattcggcctccgatctactctttgaagcagtctaagctccgcaagagaagagtggtccgtttcgcaatcctctactttgcgatgttgctcctcttcctcattcttctgatcgcgccgctggtcgttcgcaaactgaacatcaatctgcccaacattccaatgaacctcttacaaccccttgacgagaaacacaacaacaccatttcacagtataccggcaatggacttccaggtggctcgagcgggatcccggcgtcggttctagcttccgctacgtactagcggtacaattgctttctgaaattccacgttgctgcgttttttctagtttcggaacggattcatgaaaatgagctgtataaagtatccagcgccttgaagtagctgctgtgtcatacatttgcttttccctcgatctttcttttttttaaagcttcgggcgtgcagttctgtcgccgcctaagtttaatgcattatacttgtctattgtttttgtattctcaaaggtgttgtgtgtttcatgtgcggatcattagacttgcgaattcctgtattgttccctttgtggcctaccaaacatttattcttcattctatatctacttccgcctgtttctgttgcaggacgatcttctggtagatatgtagacgtagagcgccctgatccgtacgtatcacctactaacgacgtggaaccacgtagtatgaactcctgaggttgaagggaccgatagtgttccgactttgatctttaggaaccctaacgtgtggggcctcaggaatgccttcccatcggtgcctggcggaagagcccaatgcgatttccgatcaacccatggcatcacgtgcttcccgtgtcggaccatccagccccagaggtctctccgcggccgcgacacctccatcaagacaagtaatcgtcgagatttcgtcggtcaatgctcggctttgatcgcgaggctcctatatcttccttctgaaaacccccttaacacccttttgcgctgtgggcgtggtgtcactttttccatcatggatatccaggagacacaacgtctcctttcggagtatctccatgagcttgcagacctattccatcgcgttccgggctccgcaatctttcttcgctacgtaaagtccagctatcaaaatgatccgattcgctctgcagtcgagctatttctattcctattcgcagttcgctatttgctcgctcccaagtattcgaccaaacctggagtggttcagctctcagaggatgagattgatgacttggtagacgagtggactccagaaccacttgtaggaaaacccacagtcttagaagagatggaggttgataagcggacggtaatcgttgggtaactctcctctcacacacccttggtactggatgtcctgttgtccttgttaatgctgattgatcatggtggcttgtagtccagtctgccctaagtcaaaattggccaatggccggaccgtcgttaacctcggctcctataacttctacaactttaataccaacgagtcgctcaaagagaaagctatccagactctccgcaattacggtgttggtccttgtggcccccgaggattttacggcactcaagatgttcatatgaagacggaggcggacgttgcctcgttcctgggcaccgcatcttgtatcatctactctcaggccttttccaccatctcaagtgtcattccggcgttctcgaaacgtggagacatcattgttgcggataaaggtgttaactttgccatccggaagggcatacagatttctcgtagcatggttcgttggtatgaacataacgacatggaggacctggaaagagtccttgccaaggttacaaaagaacaagccagaaaacccctcacgagacgtttcatcatcacagagggtttgtttgaatcatacggtgacatggttgacctgcccaagattgtacgtgcatccgagctcttcacacgccacagcacatgtggccgctaacaacgatgtcagattgagctcaaacttaagtacaagttccgacttatcctcgatgaatcgtggtcgtttggcgtcctcggaaggaccggtcgtggagtcacggaacaccagaatgttgacgcagctgaagttgatatgattgtgggctcgctggctggtcccttggttgcaggtggagggttttgcgctggttcagaggaaatcgttcaccatcagcgcatttctgccgcggcttacacgttctccgcagcactgcctgctcttctgtcgacaactgccagtgccacaattaatatccttcagaatagtcctgaaacgatatcccagctacgggagcataccaaggccatgtgggcacagcttgacccccgtagtgactgggtatattgtaccagtgctcccgagaatcctatcatgatcctggtcctcaagcctgaagtggttgctgctaagcggctgtcggttgaagaccagcagtttctgctgcaagatgtggtggatgaggtacgggtttcccagcgactgtggtatcttattgattgttaactttacgacgcagtgccttgcaaatggtgtcttaatcactcgcctcaagaccctcctagataactttgagccgaagcaggtcgtttccccagcattaaaagtctgtgtgacgactggtttgacgaaaaaagagatcgagaaagctggaaccattatccgtcacgctatcacgaaagttttgagcaaaaagaagtaatccttacgttttccggacttttagaaggactcggccacgaaaattgatgccctctcgatccattacgccatgccttgtttatcatattcacaccttgtacaatttttattcactggttttgtacagcatacctgcacattggacagcatgcttgccacaactgattaacggaaattgaaggggtttccggcatgatgcgggaaccgctatctgatgcttccccaattcttggtcccctactaatattttttcccttcattccttccaagacttctgtctcacaatgacagactgtgattagacttctaccatgttataatattaattccattattacgctttatatgaaccacttctttctccctttcactgcatggctgacgccacactaatacgctaaagaatatagggactataagggccttgacattggtctcacatactaatgattggaatctactcaatgccgaaaatgtcatttgagtgaatcaatctggactgccatgcatacctggaggatacacccggcgaggtttgattcatatagggcaaggggccagccagcattccagatatcaatcacctaacacaggaatgcggcgatagtccctagaacatctcaaatatttaccagccacaacccagtgaatgtcggtggaacagttcattccagggtcgactgttccactcttccttcaattaatgggcgattatctacctgtgtttcccttctaatctcagggtcaaaatgctcttatagccggctgcctccttctatcacctgctactttccggatcaagtcaccccacgggctccatccaacagtcccttgattcaaggtgcaagttcaatcgccatgaagtggcttatatgtgtccttgtcgtgctcctgctcagcctccaagtcaaggcacttcctcatggtaagttccaccgtgctacatgagaagagaagcagttcgacagaagtgttttttctctctaaagatagtattacatgcttatgcaccgagtgctagaaagcctagaccaaagtgatccagcaccactttcaggagtcgcaggcaagcatgaaatccccatcaatggcgatcccaataacctcccacccttgctcccaatacctgatccagccacacccgacctggtacccagtctcccaatagaaggcggatacggcatctcatacgccccctacaacgatgacggcacctgccgatccctcgacggaatcaacaaagacctggacaagataagcgaacattatagctacgtccgcatctacggcgtcgactgtgaccagacccaaaacatcgtatccgcagcccgccaacgcaatctccgcgttttcgccggcctctttgacctgcagaacttcccaaacagcctcgaccaaatcatctgggcagcagcaggagactggtccaccttccacaccatcagtatcggcaacgaactcgtcaacaaaggccaaaatccgcaagacgtagtaaccgccgtacacaccgcacgtgccaaactccgcgcagcaggctaccaaggccccgtcgtaacagtggacacgttctccgtcctcctcaaacacccccaactctgtgaagcgtccgactattgcgcggccaactgtcacgccttcttcgacgcgaaccaaatacctgacaacgcgggaaaatacgccctcgaacaggccaatcgtatctcggccgcagcgggcgggaaacgcaccgtgatcgctgaatccggctggccgtaccgcggtcaagcaaatggtaaagctgtcccctcggcctggaatcaggccatcgctctctatgcactggggtactcgttcagggaccgaaaggatgatatggtgcttttctcggccttcgatgatctctggaaacaggatgggcctgggactcacggcgccgagaaattctggggtattatgaggcgctgagcgctcctgtccatttcgacttgcttcttatccccgtgtgtctcgggttcttggcttgagtcctgtgatggttgacattgattacgctgggcgaggtctctgtctgtctctcgctacgctcctctctttcctggtatctacttgttgtcatgtgctgtgcaacgtacacgtgcaattatcctgtacatatagggatttgtttaagcctcacaatgaagcacgagcatagcttttgaacttcttcccttccacggtttctagagggtgccttttagcttgggtagtgtcttcagttgaagctctgaggaccttctgaatctgaccttaggaaaacctacaataggcgaggattctagatagtagatagctacaagcgttttgattcacggaaatgtgagtgtgacaacatatgctgaatctcgtgtctcacgcagtaattacgtatttaggtgcggcaaagtcactgtgcagttaccctggccaatttcgcgctccggggacttatgacaagatgcatattgtgtagatcgttcctcttccaacgtggcacagtgacacagtcaccgtgcgggtattgtggggcttctatctctagcaagatgcagcagttccggatgcaaaatactaccctggctatcaccccagaccctcttatagaaacttactgagaatctctcgtgtatttttgctaaacccgtcaagtcggtcatattcacctatgacttgacctccttccatgtgtatcctcgaaaaaaaaaaaaaaaaaaaaaaaaaaaaaaaaaaaaaaagtgtggctccaactggctacaagcagccaaaatttcgtctgcagaaggtccagggccgtatgcaaatcctggcctacactagatggtgtgcatttgtatatgtagcgatccattaacaaatacaagagtttggtatcaatgaatgcttttatcctttgttagttctctgtaacggaggagagaaacaaatgcagtaaacaatatgacaatctctagtattctagcgctatgctattactattgtataacaatgcaaccaagtaaggaactgtactccatacacccgagccggaaggaaaacaatactgtaaggaaacagcgccatacctatgcctatgaatgcttatgcaatggattagtcaatcgatcatatcagttgcctcaaccgatcaaagaattaactaagagaaacattttgcacggcttcttccacgctgactgtctgattatcgtggtgtttttcattcgaaacttcagggagcgcggcgtgtccgtcgtgtccgtcttgacttggggttggggaatccgtttgggatggtctgcgtcgacctgatcgacgggtcttgggtggttcgggtttctgaccgtgcttttgggcggagtcgctgttctgttgtatttggagtcgcgacggactcgtaactggggtgcaatggctggagacatgatgagggtggaccactgggagggtagaccgtctcggtggggggacagctgggggtggatttgaggcggagcgacggccgtgagctgggataggagggacgaggccggatgtgcttgttgaattccttctgtcggagggaccttgtgggatggatggggctgtgggtgtgataggacttgggcttgcgcttgttcccgttccggttcctattcctggctcttccgggatcttgtcgttttcgtctccagtagtgcgtcgtccacgccagcgtcttgacttcggcggtagcggtttgatttttggtttattggggctggatgggcggtccgttgtcgctgtttgagtcttgttgcggctcggcgttaggacgcctggtttttcatgctgggcggctacttcttgtacgctgagggaggacgacgatgcaggctccaagtgcatgcctaagcgttgggcttggttgagtacttctattttgggcgactcatcgatactggtcggagacagagtcacgggtgagctctcaaccgtgctcgtgggagaaatgggccgtgaggtcgttgactccaaaggcgtgcctatctcagcctccggatgagagccatctgggatcgtaggacaagataaagtggtttcttcctcgggcgctttagggacttgagtgtctagctcttcatcttgcaaccagtctacggcagcacaccgaatgacgagccttctcgtcgtttcgtcgacctcgtcgaaatgcatgattttctccttgtcgacctcgttgctagaaagctgacctcggacgagaacactgagcatttttttcagttcttcacgcttgtagtgtggcggggtcttcaattgggtatgggctagcaatggatagagaacgcgcaggtaagtgtgccgtaaagcagaagcctcttcgggcaggtccagaagatttcggattaagatatcgaccaggacatggagatcgttcgtgtagaagtactcaaaggtcgtgggcgttgtgaatatgaggtacagtagctttagggtgagaagctgaagcgatgtttcggctgtctttgttaataccacatacgacgaaagtctgaaacgataccacctaccttcccgatttataagaaggatgatgttctcgccaaaagtcttatagagattaccatgcattgacaagattttgataactttgtttgtcaatggagtcgaactcttctcgtccacgggatcgtgtgctgagatcatgaattgctcgtttagaaccaactacgagtgatgagcatgatccttcaacaaaagtaccagggtccactcaccaaaactcgaattaccgtataatggtacgggtcactcgaatcataggaaagctcttcgatgatatcaaagaggctcttgatgaattcatcatccacgagaactgcggtcattacaatagttagtttacacgcaccttctttgatggtgggtccagcttgcgaaagcctcatctcaagacgagcagggactactcacccagatcctccatcttgattctttgaattcttgacatctcatagattagatccataaaaactcgatgaaggagggcttcatcgccttcaacctctttcttcctgttttgcacctgaaggagctctagcaaacgtggaaatgcgccctctccgttcatcatgtgcaatgcgacttcattctgccgaccgtcaaagagaaggaacgacgagattaggtaaagtgtatccggatcatcgtcctatgcaatctgccgttaacgtctatagagccgtgatgactacaagaccatacctgcaataaaccgtagatcatttgtctccgcacataatccgcatgcgaggcgaaaatcttcgatgaaagcagcttgtacgagcatctcgtaacctccaattcagtctggaggtattcatctgttatcgtccaggtattatcttatcagccgatgtccaactctgattagatcaggctcgcatgacgcaagcgcaagaagggatctcagtaattcagatgcaagaaataggatatcggacctttgtatttggtcgccagattcagataagatcgcagagcattgtcgatgaggtcttcggaggaacaaagggcggacacaatctcttgaatctctgtcaaaaagaacacgtcgtatatgtcagttattttaccccgagttattgtgaagcgtagaggggcatgggataaggtgaaaagcacaaatgcttctttgaaataggagttgaatccagataggtattttggcgcaagtcagagcgcagatccctatgaaatcacttaccatcccagaactgttgttcattttccaatgagacctcaaactccatttcccacggctcgctcgtcgtcgtcgggtgtgtcgtgactctgcactcatcccgtctttgcgcccgtcgcgaatgccttgtgggctccgtggggggaggaacaaaggggagcgaattgattggggttaatgacgttggtgcttgaagatgaaaggtgagtgtggccaacttttggaactaaaggcgggcagcggggggcctggcggcgatccctccgcgtggcctaaggctttcgtatttttccgtaaggaatgcacttacctctgccggacttgggcacctgttgacgttttcgcagcaatctcagtccccctagggtctgtctacttggtctactagtctagaaattatttgactgctggcgtctcaagatcagagaccctcttcttcacaatgtatagcctatatactctggacttgctccttggtatcacagtacactttatacatagaaaataacaaaaattaagcaaaagctaaaccagaactagtacacagggcgtttgaaagggtgggcttcagtgttcctacaatgaccaattgttagcatcgtcatccatatggcagagcacgctcacaaggagtacttacagaacatattcgtctagatccaccacgttcggctcactgaagagtagataaaagtattttaatgtctccgcgagccagaacgactgcatctcatcggattttggcggtttatcgacggtgacgtccttgatcgtagcatgcgctatctccgtccgagtatacttggcgatagcttcgaacatcttccaacccttctcgcgccagtactcatcgccagtgaggcggtacatgatgaagacggactcaatggcttcaggacgaagcagatagatgcgagagttaatgcggaccacacccggtggaagatgctcgttctggatccgcgacaaagcaaattcttcgtgagagggcgttggatctatcgaaggtcctttagggtcccgtcctttcacgtcactggagtcacttggttttggtgtatgtgtcgggctggcgatgacgtgccaattgcctcgctccggattacgcttctcgcgatgagatcttggaacgggagacgtcccgttggtctggattcctctcacttcctccttcttctcctccatctttgcgctaagctctttctgctgcttgccccaggcaatgcgttctttctcgttaggatccaaggccttccaatacttagcctcgtcccacacacacggttcatcttctttgcagggtatcatctgaaattgttcaggcatgataccggtcttcgtagactcatacgcccatacacatccatccgtcaatttggcagcgagtttaagatcattgtcaattccgaacaacttagacccaatggcaaacatgccgccagcgaagcaggtcagatgtgccccctcatactgatagacgaattcggcgtccagtcggggtttggtgacggtcgctaaaaagcggatgtcacggtcgtctttgatcataggccggaagaggagatgctttcgcgccgcatctgcagtcttttcatacattgtacggtactgttcgttgagaccacctagaagcatatactccttaggtaggtattcatatgtcgaatctcccggggccgcgagcccgaattgttgggggcctggcgcactggtaagccctcctctgcagtaccccgcagtgtctccagttgaagttggaatttcatgcgccttgggatctgggatctgggggtttgtattgtaaatggctggctgcgcgttttcatgaagctggcgtgattccaaaagaattcggtaactttccgcgtccgtcgggtaagagattatgccttcagcaggtgtttgggtagctgtaggagtggaagaattccgtggtaaatcacgcggggcctcgtggccagttggggattgagcaactgtacacccagaagcatcgactttcatcggccacaaacctggcatgctagtttggctttggaacttttctaactcgttcgtaatccgtgcaattgcatcatagtacttgtcatccctggtcaattgcgctaagcgtgtgaactctaccgaaagagagcccagttcggcaaggacggacatgctactagcacgatggaaatttgctgcatctcccctgctttaattgttagcccatcattacaaaagcatcaggcccatgtggtaccacttacggcttccacttgtaaaagagcatcggcatccggttgggcgtatcgaaggcgcccatcaagacttccgccaactcgaccgctttttctaggagtaagtcgtacttatgtcccgagatatcgtaggcacctaatagaccaccaagatatcggattgccgtttcgaaaacaggaatctcgctctttttatttgtcgtaaagtcgatttttttcacttggtcgacagcaatagagaattcttcctccaaacccatgatccaaagggtgtccaacgtgtcgacaagtgttgctccccacccattgaaaggatctcgaaatccaccgcggagcggcatgacctcgtcgtggcccatagcattcttcttgtatccgtcccatgcatgttcgaatgtcgccttgatggtggataatctgtttagccgtttaatcttatcttcagatgcttcatcggagaatttagcttgcagtttcggaagagacttagatttgccggtcggtaatttgactaaatccgcgggtgtgacaggatatcgctccggcaatttcttccaatgagacgccggttgatcctcgagacggtccgaatctagtttaccctgactctgtgagccagagttgtccgggaattgaggcccatcctccttggacggcggttcgtccgacggtttcggacgttcgggggtggataaaccgttatctgagtagggaggctgcgacgggacgtcttcgtctggtgtactgggatccgtcgagccctccagtagaggggttggcaaaggggtctctggtgcaggtcccttgttgtccgctgcgggtggactttgagggtaagaaaccggccgatcgacaggcggaggaacacccaatgtcactgtagggggctggcgagatcgactaaaatgaatgatggccaagacaaatacagctgcaaagattagcagaactcgatatcgccgggctcgaaacatggcaggcgacgtcgccgtgggcgaaaaagaaggaccagaaagataaaaagtgatccaaaaggggaattaagggtagaaaagaaggatgaagagcgacatgaaaaatccaccaaggggggcagaaaagagaaaagtactgtcgtggaagtcgagatcaggagacaagaaagagactggtaaataaattcaagtaaacaacaaaaagaatgctgcaaattggataaatcaagtggggagaggtttctttagatagatcatcgtaaagacagatactttactgtcctgcctataggagaagagtattagcgattgaggagaaaaggaaaatacatgaaattttccaattgcccggctgaagcaaagaagacctaacagattgtttgaaccaacaggagagaaggccaagagacgagtccctcgggcggggatcaaaattttgattgtcagtcacattaccgactcaagtcctagagggggaagcaaagaaacagtaaagatcagcatttgcctaacgtagtggtgaattctttggtcccatactcctagagagtcgcattgcttgcttaatggtatcaacttatcaagcgccagcagagggatcagatgcgctgctatggctgatatcggcaccgaggaatccatcccccggatcagcgaccgaaggatcagcaccccgaggttccagactcttcaggtcaattgcgaagtacttgtgagactgttctcccctgctcttgaacatggtgactattcagaattcaattgaaacgatatgcctgtccctattaaaggactggtgaagcatcatactcaatccgtaacgacggagtactagaattcgatactagacaatgaaagggtcttgccggaccatgcagggttcaatgtttctaaaaataaccccatgaccaggggcagggtctccttattgtctgaaagcagtcttatgtaatcaaactcgtaggagcacaacgcgcatcgtgtcaagataatcaacaactttaatcacatactaaacaaccaaactttcaaaaccaaattagtgaaatagacgacctagatctgaagtatttattgaatagcccactgcctcgctagaaggtccagatatagagcaggacatcactaaacttgtccaaaaatctggcgtcgtgtgttcttccttagtattggatataacaaggcttttaaaaccagaacagcctagaatgaggcgcttggcctggtaagtctaaaaaagctcagttaggcagctaaacactatataatttaaatagtttgccggaggttgagaattagctacacgggacttgtagcataatcagtacagtcttaatcaacatcccattggattttgcgcaggtattattgcgcagcggagcgaagcatagcatgcattaaatatatataaatataggaaagcaaaaagaaacgcttgttttagataccgatatagctgataaaaagagcactatgaatttacgcatacatcacttaattatagcgattcaaacattatccataatatttttgaatagatcctcgaatcctactcaatacatatcccgtctgtcatacaaggcttataggcctgatctagttgatttagagtactatagaaaggatatatcgattatgatataggctgctatatagaaagtggccggtcagaattagtagtgtcactattgatgtgagaacagaatgaactacatagcttgaaatcgcggctatttaatagatatctatatctggaaaaaggcctcctactgatatacgagcctggaattatatcccaatagcataatgcaagaaaaattcatatttgctacgaggtgcaggcctggtctgaatcccacgggatctgcatcctagaatggccgtccccttcgcctgatttaaaccctatagagcacatctgggccccgataaaataaaattgactggaggtgtctatcctaagctctttctagacggggtatcagaaatggatatcaagtgtgtgctcctatttggtgggtcttctgctcggaccttgactaggaactggggaaaggatggctgcatggtccattatcttgtggatatgggaaatgatttcgagtccctctccctcgatcgagagggttgcatcgtaaaagcaatcttcaatttccacgaggccgaatggtatactctttcgagttggccgtatacatagtctatgagagacaggaataacctgatcattgactcgtgcgagcgaagtggaggatgatcatcaagaggagtcaaagttaggttttgactgaattatcgtgtcatatttgcgccgatctgacgttatgggatgataatcatatcccatctttctgtaaaggtagactatgctggatcagtacttgcgtacgccggtcatcagcattatattgcatgtacttcgccatacgcctacagttcagataatgttagcaacttcccggctctatatagactcttgtccaggaaggacaggtacatacgaccatagggtgtggagaacagggcttcccgtccgctcagccgtacttaagccacaattatcaacgcggttagaagtacaacgagccctgagtgcgttgctgctcttaggggtgataggcactaactcttaggtgagtgcaggtgagatgggtgacaacgtggtgagaatattactcacttgggtgagtgggggtgagaagggcgagaacgaagagttcacaaagttcagggccctgctataatttcaccaagcttaagataaatagcgaggcttttcctacctttatccgacaccttttgaacctacattagatacatttaccgtctctatatttattattcccatcctcataactcacgtgaccagagttaacaaagacagtttcttagttgttagaatggaatatcgggataatttcaatatcttcaatatcttaggccttggtgaccctgaagacccagagtcccaagacaaatagaaatggtgattttggtgcatagtgttgaaaaacagctatttacctgcaatgttataaaagcccttttcccaaattttacatgcgctctcatcatgtagaatctgtagccgggcaaaacgtctctttctaccagtctattgtttagcccaagttcgtcagccggaataggatcactcttattatttataatattgcatggtcgccctttaaaccccatcaatattttcttttttatctcgatacatttgtttgatatccactcccattctccactaagtgcctttctcccaacttcatcggacattgcttgatgcgggaatgataaacacgactcgattcgcggccggtatttttctgtctcgtgtgtcctgattaggaacttgtcagctagcaccggcacattcgcagctgaagaaaactgacgatagatcaataaatataaaagatgaacaatcctcgaagcttattataagcttagtagatatgttggtaatggtaataacgcggactccgacatggtgttagagaacggtcatccacatttgacggtgttctgttttgctaccccacatccaccttgtgaccgaccgcatttaagctggagacacgaagtctatcataacaatcctttatagccttatagtcactcttacaatatatcttaaatttcataactctattatctagaatatcagctaggtattcgagcgatggacccatggatattatttatatctaatctcccgaccccagcgggcgccatctgtcgggactaccgtgaatacatcctcccactttcgcccatcatctagaaggacctcatcctctccgtccatctgaaccccaatctgctggagatacgatcgtacctcttgcaggatctcctgagcattttcatatttccccttccaggccttaaccagcatcggacccaatcgttcctcttctaaaagctgtagcttgccttccttcagccgttgcttatggtactcccatacattcacctccctgggcatctctgccggatccaatggatcggtaggcatcgcccacctcttcgctctatgactggacgcatcctttcgcatcaattgccagacaaaggtcgcccaatccgagagatcgatcttcggactgagctctgggtgcccactgtcgggattggttgggtaatagatctctgtttcgtatctcgtcccgtcaggagagtagggccattcatctgtcgggatggttgcgttcacaaatcctgatagtgcaatcgagagatcatcacgtatccatatcgtgctcgagctgaaatccatcaggtagaccccgtgttcatgcaggaaggctagcatggtgagtgattgcagtgtccagcggtagtagagcaggaggaggggctctctatctccattatcgggagagtccttgtcatcggaagacatgcgcgacgcaggaaaggtagtcagaagtggcagagtcgtagcgcccagtgggccggggtctagcttctccagcagatatcccacagggagacggccaagatatctactcccaccacacagagttgcggtgttctagcggtgattgacagagatgagcaggcggggagggtttgctcacttaacgatacgggggtgaagatcaatcggttggtctacatccacattcgaggtattggtgctatgtgccagatattcatatacccgggggattcgctcagcaatgaacaaccactcctcggggtcgacacggggattttctttctcgcattgttgaaaggccacgatgcagtcttggtaggcatgctgcacaaagtacatctgttcatacagctcgtcgtaaaagtcctctggccggtcgctacagaccgaagggaccacatccccataacaacgagggtatttggactggctgggtggattggggggctgtcgtagatcagcagctgagaataagggctcctcagggtggtctgatgaccagccggcgcccataacggtgacttgatccataaaaagaaggaacgtaaataaaaaaggaaaaaaaagagagaaagagatgcggcgggtggcatgcacctttattcatatgttgagcggcatgacgtcgtcgttagcgttcgtctaggcttagcagccactccaccaactattaacttttccccaatcctcctccttgccctttacgacttcaaccccctgacgaggtttcaacagtgagaatataggcggtcctcggataactatactttgtacgtttcttcccatgcggtcaatatataagctatgtacagcggggagacacccggatgtatatgtccctctgctagatctagatgagctgacttaatgacccttccaggactcgtcactggctactgcaaattcacgcaggtctgatccagctttatcgtgccaaactgatacaggaggttccccgggaaataggtaaacagcccttgccatttgagcgtccacccccgcccccagaagcctggtaccggcttacgactctccttgagatattgcgccgatgccttccctctctcgacaatccgcttgagttcgagctggttgaacttcttccactccccaactagatcgctgggcccccggttggcaatgtaccagttgtcaaactgaagcagcacgtcgcgcatcccattgtagctgtcacagaacgactgccacacctcgggatggttccaatagctgaagagcattcccagctctttcagatatgccagctgctcgtcgccaaggtccaggttatcccaccgagaggtctgaattggggaagatcccttcacgatggcccccttcatccagttggagtcggtaaggaagacagcgaggcggccttgtcgatcccggctttcgagctcataactcattaattgggcgacattggtcgttgccccggcccatggagcccgtgagagaatccatgtgactatccaggtgcagggccgagtgacggttgccacgctcgtcatgtggacgttgaagaaccgcgagatggtctggccttcaaacggatgttccgctgaaggacaggattcgagtcagcttcgtctgtaacgagggaggaaggtacttactctcatagaactggttatgtctgatgttggtgcttttgtcccacacgatatctgagttcgcaaatttgcccacggcccagttggtgcaggactgtgacgagttatgcatatacttgatgacgttttgggtcgaccagtgagaattaaaatcctggggccccagaacggcattcgggctctgcttaggatatgaggggtacttgggcccggtgatctgagtcctacagatattcagtttctttggtgtttggctgatccggggagtggtggcctgtcgttctaccagccaggttttgttgtccgatcctacgcaatgcgcgtcctggagtccgcagctcgcattgatcagcagatctctccgggccaacgaggtctggtcggaaatcgggaagacataatagtcatcatcccggacactggcctgggtgccatacctacacgggatacaggcgcatccacaacagggctcctcgacaaccccctcggtggtgcaaaatccgcacccattgcacaaaatccgggctgccatgttgttccatcctccatcacccaggttaattccggggaccaatagatctggatcgaagttcgggttcacaagctggcgccgctcgatgcgatctcgcttagtcgccgcgtcccctgtgaagcattggcgttctccggcctgcgccagctcctgcacgaaggttttcgtctccttgtccttccatccgacgtaagaaccgcgctccagatgactcttcattgtagtgcccagactagtggtcagacaggatttcgccccgtcatgctcgaagtgccagcgggaatacaccgactgggacacggacatatcaggcagttccccgtcaatatcggacagccacggggacgcaaacttcaagtgcatcttgataccaacgcgggtggttgtcccaacctcaatgaatcccttggggctctctgcgagcggccgtgagatattatccttctccgcggtgctgaccttgtcgtccgcacgccgtccctcagaggtaccctctaacgggctgtcgaccgcaccagctggaaaattgaccagtacacggccccagtcagactggatgcgagattctgcgtatgtatccactgccactgctcctgaattgccaccaccgctacggagggagacgctgctttcccggtacaagtcaaaggaggcccatcctttgtagatgctcttcccggccaggctggcttcgccaagaatctccgtgatggttgatccctgcaaactctgggaggtgtccaggacgccctgaccgccaatcttgaaggtcacatccgtctccccgtccggatggaagaagccggccgcctgatgaacgttaaacgactttccaggctgccaggtggcaatcaatgagaacccaaaatgtgactcaacggtagtagtgccttccatagcaacgctcaaggattccccgacctttgtaccctcgtacacgcagatctgggggttatgatacaccaactggtcaagcttctccgtgtacttggtgccctgggccgcagggaacttcaacgacttgaacttggtgtaccactgatccgaggaaccgtagaatcgattcacgagctggttgaggtcacgtttactgcttgaagaacccggggcgtccaccacggcgttccaatacccgggcacattcgagaaatccattcgtacactgaactctccggcatcccggcgccagggccgtgttgtagtcgaaggtgaagtcaaacacgggggaggtggtcgccccccgcttggccagatggccggggaccgtttgcttcttcgagagggtgaaggagacagcgcgcgcccacgatgggcccccgcactcttccggcatctgaacgactgtgccctcgacgccgccctcctgcacccggaagcagtcaggcacgttgtctgagtagcagaccacccggactgtctggtgctcctcgttgggccgggagaggactcaagagatttctgcagcgggactggtgagacacaggtcaaaatatgccgacaaagccagtggaatggactgtgggaagcgaggaaacgtagcgattatctaaaatcgctacaaaatcattgcactatccgtgtcccagcaggggcaggacggtctttttggttatctcctaatctcatcagccatggtttcgtcgctcacgctcattacccttttactgggggggtggggagctgaagtcgctgcggacagctatgccctgtataacgcggattcagaggtccttctcgatgcctccgagaactgtctcgcggcctttaatgcgaatgtcacctgtcccgcgctcacgggggaattgttcagcagcccgttcttcgagttcaaccggaatactacctggctggaccttgtctgcgcaacttcatgtcgcgaatccctgcaggaacaccgcaacaacgtcagcactgcctgtacaagtgcgcggtactatgatgagttcgaaaagacaacctggcagccctggtatcccgatgactacatgatctattcgcacgatatcgcatgcatgacccgaaggtgagccttgatgggcccctacaaagaaacctaagcatatatatgacctttctccagtgacggtcagctttgcaatgcatatttctgggaaaccggtcccccagagtcggactgtgatgagtgcatgctcaagattgtccaccgccaagtgaactcgccgttcgcgggcgacgagtcggacagggcgcatttctcatccgcgacggaggcctgccaggccaccgggtatccagccaccgtcgcaacctcgctgttgattagcacgtaagtggcaggggctgctccatactcgaagacgctgatctgacacgatataggccgacgccgacagcgactggtagcaccggaacgatgtactccattaagcccaccgatgacttctactccatccccaaatctcagtccgtgggaacggaccaactgcttcgctcgaatgggttgtcctacgtgcaggacaaattcccgactacgggcacgctgtgtatcgaaaacaaatgccagacacacgtgctggcgccgaacgacacctgcgcctcgattgcggccgctgctgatatctggcaggtgcagctcctgacgtggaatcctaacatcaaccctttctgcaggttcgtctaggagtgagtgtgttggaacttgtatgcgtgactgactatcgtgttccccagtaatttggaacgttttgtgggaaacacgttctgcatcagtaaccctctgggtaactatagcctccctgattctccagttgtgacgcctatgcccacgccagagtcagcctatcttaacctccatttttcgcttattatcactgactcttatcaggcccgtcccggataatattggtcccaatgacaacgcccgatgcggtcgatactacgccattgtggagggtgaggattgcgccatgattaccgtcaagttcaacattggccttaacgacttgtacatcctctacccctcttggtttcttatcattccaacccacgcgcagcatcttcctcaacccggacgtgaatgccaactgcaccaacttatggctcaactacagctactgcgttcagcccgtgggtgagatctccacctatccaggatacttacccggtcccacggcgacacggccgcctttcacagcgggccccagcacgtctatcccctggtacgatccggaatcaacgcaggatgccgacctgctggtcatcccgctggccaacttaacccgcacagactgttgggactatatctggatcaacagtaccgacccggatcagttaggctgctgggactatgcatgggctgctggcgttgagcccgatcaatttgccctgtggaatccgtccattgaccagaacgcggaggatagtttggagccgacgtacgactaccattgtactttgactccgtctgtttcgtattgtattggtttagcgagcccgactcctggtaagtcttctcctcatccttagtcttcttgctttatcctctttgttggagttcgatattccccgacaaaggtaataatgacaagtatatagcccccgcacaaaccgccagcgcgcccgttccgcgggcctcaggcgaaatcagcgactgcgtctggtggacctatacagtccagggtctaagctgtgaagatttactttccaacctcggattgacaatcgacgtcttttaccagatgaatccatctgtcaaggaagactgtaccggcctggctgtgggcacttactactgcggatccaccctttccatgggcattctcgcagatgacgaagatgacgagaaccccctctccaacaccaacatctccaccgccaaccccaaccaccacgccggggggttcgtcacccctactcctatacaggtgtgttgctgcccgtggggagctacaagtctctacatgatactaatcagacaaataggagggaatggtatccaactgtgttgaattctacctggtcgtaacagacgatgactgctggtcaatcgcaaacgatcactccatcagccaggccgatctttacgcctggaaccctgccgtcggcaatgactgcgccgggctgtggccagactactatatctgtgtcggcgtggaagggaccaccaccagcaccccaacttctactgctacgccgacgtctaccgagccgggatcccggagaactgtaataagtggatcatgcagcaagacggggtattttgctatgacatggcggcgagcgcaggaatcgagctgcaggaactgtataagttgaatccggctttgaatggggattgttcggggttgtgggctgggtatgcttattgtgttgggacggcctagtcatctagagattgtaacggcctgcgcaactcagataatacaatatctttgacccactattgtagtatagcttgactccagaacttgtgtaaactagtgtccctggtgttttcctggggtagagatttacttgggtatggaggaggaagactagtctgccatttatcatctccgaagtcgttgcgggcatgaggagctttccgccctatctcagttaaaccatttcaacaagaagatatatttcgctacaagccggcctttatatacttgaaggtgacagccaacaattcccttagacaggagccaaagtgatttcactaaggaaatttgagacttcatactttctcctttttctttcgccttccacgatctccgatgccagtaactgactaaagaatagagctctgaatgtgtgaagtatcataatgaatagtaacagatcattgagtatttctatagtcgatacagtgacctcatataggacattccgagtagcaacctagggcttctaagccaatatctactccgaagtgccacgggtaggtgtatatacactcactatagcgtgcgtgcttgtatgagctgtgagtacctctgaacttctatgctaataatgtagaaataggaagtcactaatccttttaagaccaatgaagaagtgtagaggtgacatattcatccgcccctatatcccaactgtggtgcgtccgcggttgtccttgctgaccttttgaaattgctggataagccctaaaacccctgcgttcccagcaatctcgtcgacattctctccgtcctcacccgtatccttatcaagttcatcccctatcaagttcatccgccaggactctcccaggttgctatcactggtaccgatagcgccaccgctggatcccgtcgttgtatgtggcgacttcttgacagcaccacggcggatctctgctgagggtgattcattgtcgtcctcgattgggtcagtaatgggtcgcactggacgcgacgacctgaaccgtggataaagggcagagcggtttgccgttcggaaatctgacgctgtcggttgatgatgcgggtcaaggaggatagatggtgcgggagacgcgtgatcgccaaagcctgcggccccaaagccagggcccaagcccgattgttgccccataaaagtagctgctgggccatgccgtgtttgagttcgttccagccgctcaccgatattacccatctcaatggcagacggcgaccccagcgtcggaaaggcaggtggagggtggaactgacggcgactggacgggttcgcagggcgattaccaccataattatccaaaaagccatagtaagatgcgagcattttgccatccttagttgaaaagtaatccgcccgcaggtcctgcctcccgctctctcgtcgtcccgtaccgccttgactaatgacgttggtgcctttcttgaaatcaaatacggcaaatgagcagagatatcccatgccatccacatgcacagtgaactcccggaagaagtcgataagacgatcgctgcatttaggcaggctgaaccagagaataaacggtgtgaagatcatgctcaggatctcttctaagaagatgacgatcttcatctggtaaagcacagcaaactccttccgaacttcgtcactgtgcaaccgtcctttccaatgattcgggaaatagtgggtgaagtcaatcacttcaagaagtgcgaactcgggatcaaacacatttgtttcttccggaactaagcctcgggcaaaagcccagacagagccaaaaacacccaggtagaaaaggacggtccggtcatgagtgatttcaaagcccagaaaaagttctggatctatgatggataccagggccagtacggacgctagggcgccggaaacgaacgccacaaagccagcaacctggacagtcttatccttaggaaattggtccacatagcgactagcaaaaggatacgacatgttgacgcggcgctcgaatagatgccagagttcattaaactcgcggaacttccattcggctaagggggtatactgccgggatccaatctgggctgggttcttcttgtactcgttaaaatagcggaaaaaataatgcatcaagaagtaaacgacaataaagggggctacgaagatattcatgatacctgcgaagatgaatcgccgccgcaggccctcgctcaaggcttttcggtgggtgtccttcaggaacaaggttcgtacttggccctggtcattaaaaacatagtccataatgcagagattgatgttccattctagcgtctgcgaaaatagttgcctgtttcggaggaacggtattgggagagtcaaatctagtatgtctttgttcaccaaagcgatcaagtaattctctttacgcatcaatcggtttgcgatatcgtgagcatccatcctctgcttggactggcttcccatgaacttgcgatgtctggcagagactgccccggcagtggcagggttcgcgtctctaagagtcatcagtcggctcacaacctcttgccaggagatcgtttggatctcgctatcagagattccaagcaaatagtagtaaaagtcatgcatgtgcttgagccttcttatatccatcaagtactgaaaggcctttccaatccaaaaaacagtcaaaagccaaagtaagaaggtagaggacatagacatcttcttagtgcactgttggatgagtatgtcatccattttcctacttcctcgaaaattgcgataatcgatgcagttggtgagaaaagtactaaatcccacaacgaaagcaaatgtcctgcaatttgtttatgccatctgttagcggaggtaaccatataagagccaatggtgaactcaggtaagggcgtacaaaaggcttaaaccccggttcagcaaaattgaccatattccattccctaggaagtacgtataaacatccttcagaaagttgtccagattctccacgtttgcccacagccacatggctttctctttgggatctactgaggccaagttaggatgccccagcgaccagattaccccgggacgttggcccctgccatcattgtgtagcggtagctgttcccttgttgtattccaacgagcccggtctgcacgtgatgaaggaccaggggcaggagaaagttctcgctgcggatgacgatgagaaggaggaggtgggggaagtcgagacctcatctcgtcgtcatcctggtgtccttctactagaagggatggaggtacatcatcatcaccgtcgtcggggtcctggtgcatccaccgaggacgactgtgttttcgccgccggccaccagttttagcagttgctgtgccagaggttctctgtgggctccgttgagtcaggaacggctcgctcgggctggggctcggactccgtatgccgtctctcgcagcatcgaccatggcctcttccaactcacggtcactaaattgagtcctccgatcatcttcaaattccaatcccgcacgctcttcaacatccgaaggattcgattctgcgtcctgctgccgaagcgtttcgtagaccgatggcgagccgttcggaggaaggaagcgggataatatatttgatgtcatcatcatgggctaaagatcctataatgttaatccgaatcacatcagtatgagctgcctaaacagcagtgcatcatagccgcccttaagccggaatacaagcgtcagctaaggaccattcatcgaggcagatagcagcggtcagcttaaggtacgaatgggagctgggcgcaatcaagaaattcagttgtattcttagggcagaacaaagaatatattcggcagagagctaataaggccttatgtgctagactgaagagtaatacgaaggccgagtgagcagggagggcagcgttgactattagtgtaggggagtggttgacaagcaacagcatccggtcagtcctcgtgataagctatgatgcaggcggtcacgccgatatcagatcgcagcctgaggcctacagaagtcaggtgaagtatgcagttgatcatgtgaccttgatagggatcaacggttgatccggcgggtggcccccaaagatgggaatggcaccatgaactgacgattacgtacagcaccaacgtgatcggtaatcgagtcaggagttcgctgacgacacgagtcagttgctttctcgggatgagccgccaaaacaccgctcattggttcaatgatccaaaatcctcagcctcccttgcgttcatgcggggggatggattggttttgctctgctcctggcaaggcgacttcggttgtcggtgagtctcagtgggctcgagagtgcgtccagaatacagagtacctttctagaattaccgaaacatgttccactgcaggggggtcagatagcccttacccagctatcgtgcaatgatgtgatcatggaacaggtcttgtcgccgtttgttcctgcatctatcgaaatatcaatcaccctatgtaaattcatcgtacattttttctttttcccctgccttaaaagtaaatggaaacaaaacaggaaaacgaaaagaaaaaagaaaaattattgctctgtacaatgtggcccttcctatcatggttcctttagtttcatcctaagatccaccttccgggttgtgtattgtacctactttagccttcatccgataagtactccataggtaatttattttattcccccgcttaaatccttaaatgcaattccgaatcaacaccattcattttctggaaatagctttgaaatataattaggtttctttggatattcaggtctcaccttcagatggtatctgctattcacttctgtgtccacccaagagagaactagcaatcacagaaacccagaagaaagtggataggaaacccacacggaccagtaagtgagtctagcgtctacaagctaatggatgttgagccccaaatccatagcgcaatggcctgcagaccgggcaccacctgactattacggagtaccacgtacaatgcttcctagccagcctgtcagactatcatctagtgtcacgtaagttgtaactcatgctgacacgaccataatgatgataggaggcaatggttctctatcagaccgaccctcctctactctgactgcttcaacataaataaccaggacgagcctgtcaggaaggctagtgaaacagacccctgcgatgattaccattagtttgctggctagcttacctgtccctgagggaagtcaatccacctaggtcggcatactttcggagatagggagtctaaccgtaacgcagccagcgggcacgggctgtccgccctgcccaggtccactcgacaggtggatatccatttggaggttcgtattgattccataggcgaccatacaagacatccttaatcacggtccagcattgtgcctcttgtcagataggaaaccatatcacttcctttagaccaataagagttgagggccaccggcaattgggttgtcattttcgccgcatttggtgtgattcgataccgatgagttgccattcctgggatccacttcaaagtggcatagttgcggagttctccgtcctgcgaggcggtcgaatcatagttctagtggccatcacgagaagatgaagacggaggagggagtaagcccaaatcaatagtgtattctacttctgctcgccttatcattggcaaaaggtaaagacaaacagtaactttgaatttctttctttctttttcacctaccttttttttccttttgtttcccttcttctttctttcgatgcttcgttctcatgaagatatctcctgaagattgatctccttggaaagaaaaggacatggcggacgacatggtgggactctttatcaggggaaatggaaaataaatttccgggacagattcttcaggttcatagattacacgatgattactttgttagggggggacttcaggttggtgggttggtggtatgagtttctgtcgaatgatgggtctttccttcactatttcctaatatcttcatcatattacttgacccttacccataccaaagtaaataataatggccgactattattattacacaggaagcgattcccatcctccttactacatagtgatctcaagtctgtatactgtatactgtatatcgtcgaggattgatattaagtcgaattaatagtaccattggatatacctacatttattcataattatgaagataaagttgttcattattatttagcgggtttgagtttctagtccctttttcgtcgtctaacaggagtatctgtaaggactgtatttcattgtgtatgtgtgtgtgtgcgcggtttcccctctttctctttcttcctctgccgtctggccctcgttcttgaaccccatagaaccatgacatggacttaagacggcctcttatacttcttgggatttcttgacttcacctgctcggaccttgggaggttcaacaccgcctcttgcccttctcatactttgcctctttctcatacactctctggctttggaaactttttcttttttttttttttccttttctctctctcttctcgttacttccaaattttctccttgagaaagctaaccgtcaagggtctagtccagcactggttacttgttcgaattggaggtttcagatagtacgggaaagagagcgtgagagtgatctgcagctttcagtacttgactatacacgctgttagggtaaaacaaacaacaaatccaatcaatcaaaaattggattgccacagggaactttgacaacaagatcgaataccaaaaataaatctcaaatactactgataggaatttaaaattttcttactactgatgaaggtgtgttccttttttttaattcaattttttttctttaaacctcttctccttgccctcatggacgtgcctctcataagcttttcctttcccccatgatatcacgctacgtactggttggtttggttgaaccaatctttgccgccaaccgacggtgaccttaattcctcctactcactgccactaccaccaactaccaccactttctccagagtttccctctctccgggctaacgtaaccgatcatgcttcccaccaacagcgacttcgtcccggtacattgacactcggaggcctggttattcactgctattgttaaccttcttttttttacgtataattttttttccctctttttttttatatttccttttttccttttgtcctttccaactatactccacaccacacttccctacctatcgcctacttttttttcccattcttaaatattacactcccctcactccctccctccctccctccctccctccctctctcccgccgcccctgaacttaaccggccgttcgggggtcgtgtcagttcttggtcttcctcagctctcgtccatcgcctggattttcaaacgcgccggccttgaccgaatgtgcgactcgacttgtcgacctctccccggactccatgcgttcagcccgtgacccattggacgacacagaccctccattgttcgaggacggttgcgcagcgtacgttgggtgccaacatctgcaaggtaacattttacatgagtacatgtgtgtacgtgtgtccgtctgcgtcctgcgtgtttggtagcgaccgctctcgagagtgccgctgctgtccgattttcatcgtgcgtgacggaacaagatggagcccgaaggttcaaatgggcccaaacggaattccatacaccagggtttatacagtcgcccagtcgaacggcgttcaagcaaaaaatcatcatccagggaccgtcacggcatggtctaccccgaaagcttcagggatacaggcatccgcacagtaacgccagactccgccgcggagaccacgaaccattcccctctgtcggacgcggagcatctttcttcaggcgcagccccttcgccccgtgtgaccgccagaacaaggcctgccaatctagatactcgtcgcgacttccaatcttatcatcccgcgggcgatgaggaagagttccaagtggaatcgaagagccaacgggcgcgatctcggaccaccaccttggaggatcagcgcagtgagctctccccaaactccttctatctcaaatcccggagccgcttaggctccgtcaatgccgtaacgccccagtcaagacactcagatgaaccaactggatcaatcggctatccatcaatacaatcgcccacctatctgagccaaaccctcggacgtcaccgggtcagccgagcctccgggggctcaaactttctggccagtgtcgctagcaatccgccgccgtcgcctttgtcgagtaccgattctgcgaagatcctacagctgatgaagaccacatgcggaaggatgcatggtattctttccttccggaccgccaacaccaccgcttggacgtccggctactgcgctatcaacgttgctacgggaagtttgatctaccaggccaaaggggagcccgcattagctaagaccttgatcccggaccttcgcggctgccaggttcgctcccttgtcgaccccgagcttcggacgaactatctcagcgtatctacatttacctctggccttggggtagagttgaggcctcatgtgagcgaaacattcgattcgtggctcgctgcgttgttgtgctggcagccaatcaggccaaaaggtgttcagaataagatgaccaaacctcagtcggttgcgataggtgatcgtcgtcttgccgaccgtcgaagaaactccgaaagcactgttcaaaaagaagcagccataatcaaagtgggtaagatgctcctatgggatagaccaaatgcctcaggcgctcgaccttcgtctggtcgccgggtctcaacataccgccagcaacgtgcgctctcgtcgtcctggcaaagggtcagctgcacactgcaggagaatggcgttttcaaactcttcaccgaatctgacatcacctttgtgcactgcattcaattatctcagctctcccggtgcgccgtccaacggttgaactcgtcggttttggaagacgaattctgcattgccatatacccacagtatgcggcgcactcagtatcggggctgacgcgtccagtgtatctggccctcgaaagccgggtgctatttgaggtgtggtttgttcttttgcgtgccttcacaatcccagaactatacggccctgaaacgtcaatcgaagacaatccggcgaaggctccagcgcccgatgctacctctacctctatagcggacatgtttcggattgagagaatgctcaccgtgagagtgaccgaggccaaattattccgtagcaggtcggaggaggcccctcgaagtcgcaagcagtcccgatctcatagcaactcgacgccaacgggcgccgtgaacgattattatactgaagttctactagacggagagatccgcgccaaaaccgccgtcaagtaccgcaccgcaaatcctttctggcgggaagattttactttcaacgacctcccacctgtcttgtcccaagtttcgatacttgtaaagaaccccaatccgacccaaaaagattggtcgcttatcgcgcacgggtcgtatgccttgaatcaggatagctaccctatgcgcgtgttggatgacgttgagctgtcctctcatgacgcaacattcggaagagtagaactgcgactggatgacttggagccgggtgtggaagtcgagaagtggtggccgatccttgatgaccgagaccaacccgtaggagagatgctgatgagagctcggatggaagaaactgttgttcttatgtcccatgaatacactccaatgtcggagcttctccattctttcaccaatggactttccgtcaacatggcccagattctatcttctgaacttacattactatcggaggcgctcttaaacatctttcaggtgtcagggacaaccgtggagtggattcaagccttggtcgaagatgaaattgatggacttcacaaggactcaaacgcgaacagacttagatatactaccaggatccattccaacgacacaagagagtctggtcaggatcgggaagtccttgtaagggatttggggcgtaccgcaaccgtggaggctaacctccttttccgagggaattctcttcttacgaaggcgctggactaccatatgcgtaggctaggaaaggaatatctcgaagaaaccataggtgagcgtctacgtgatatagacgagagcgatccggaatgtgaagtagacccttctcgcgtgcatcgttcggatgatctggaacgcaactggagaaatctcatctccctcactaccagtgtttggaaaacgattgcgggctccgcgtctcgatgccctgccgagctgcgactcatatttcggcatgtcagggcatgcgcagaagatcgttacggcgattttcttcgcactgtcacctatagtagcgtctcgggctttttgtttctgcgattcttctgtccagcaatcctgaacccaaagctgtttggattgctgaaaggtatgcattttctggcctctaaccgttcagtttcatcgactaacgcagtacagatcaccctcgccctcgagcccaacgtactttgactctgattgccaaagctttgcaaggattggctaacatgactacctttgggagcaaagaaccttggatggagcctatgaacaagttcttggtaggcaatcgtatcgaatttaaacagttcgtggattcaatttgtgcaatacccgccgaccgaccaactccaatcgtcacaccctcctatgccaccccgattcaaatccttggtcgcttacctcccacgtcacgggaagggtttcccagtcttcctttcttgatagatcaccctcgcagctttgcgattctgattcggatatggcttgaaggggcacctgcgagacttaatgagatagaagatctcgacccggcacttaagaaattccatgacatggcgcttcatctcgaccggcgtaccaaggaatgtttgagtaaagccgagcaggcagagcgcccaagtggagatctcgaggttaagtgggaagaactagttgactccatggaacggtcggccactttctacgaggagagctccaaacccactacgccggccacggagacggcaattgcgggatctgcgtctatcgctggaagtcaccgaaattcaatcggctactttgctacgcggccttcgctccctcgccggtcgaccgactatgccgctgacggtgatgatgatacccctccaagctcttcctcagcaacatgggaccagagtcgtgtgcctttctcgataccacggtggtcggacacgcgtgatagcactggtagttccaagaattcttcgacttactctcttgaatacccagactcctctaagcctcgcaggtctagtataaccagggagacggcgagcaagtaccgattctttgaccttgttccgactacatccagacgtcgggcgagagaccgagagcatgctcagcagcaatcccgggaagaactccgaaatgaattttaacgggctaccttgaccggcttacccatctatatagccctttcgaaaattacacctcacggtgccgatacaaggtgacatggctgttgcatgttattaccttttcatccttttgatctctagctttccctcctaggacttcctcttcatcttggaatgcgttttgactttagcttaggcgaccgtggaggctgaactgatcgtccataaaatttttagcagttggcaacggttttgtataacacggcggatctgtgcaaacaaatccctgcatcttacggtgtacattcttccttttcccctacacatgtgctcatgacttgacgcgtttcccttctacttctcccgatttttggaaagcatttgtcatggtgttgataccctgctctgattgctgtttttgacgtgggaagcgagagatcctgcgagcaacgttggatgtgaaaatgtcattgtcctgggttgctgtgaacggcaagggtcttattgaaccaaactgttgcaaaagacagtgtctcgatttgtgtaaatagtgtctttcccttcactttctattttttttttttttttttggcatagacgaaatgagtatccaattgacgcggatagaccactagtattcctgctggttaaagtccttatttcctcatgaatggtttattcgttctcaaccgagttctgtacaatcgttaacccacagggtatgacatagaaccaagcaacgaagaacgaaggaacaaccaagcaaaacatgccaggatacaggtatgtctagattattcagagcagctaacaaagatctacaaatacatgatagccgtatcacatccacaaacagattttcccgctcgctgtaccaccggctatccaattcttactacgatggaaaactgcaacggcgggtacggcagtgatgccgtcgcctccaagttgcgcgagctggtcacccgaactactgtagacgtcgacaaaacgattcatatttccgatgcagaatcgctggatatgcgattgaggatttatttgccattgaggacggagactataagatgttaggtcagtcctcgctttcacctgataatcgttacttttggataggggtcatacatggtaacccatcgtccagtttgacagttgtgccgtaccaccgtgtcgggtttcatttctgcatctgaaagggtatgtcctggcttccaggaggcaattcctttggcaccaaagtcatacagttttaggctgtcatcgtaagaagatgtcgcaacctgtccggcactattgaatgccgcatgcgaaactgacaatcgactctggtgctctcccacaggaacaggctcgcgacgtgataacttccgaatatcccaaagtcgcatggtccggtctaaactggccgtcgcaaaatagtgcgagtgagtcgggaatagcgaaaagccacctatctttttctcggacagactccagacggctaccgagccttgcttgggtgtacgcatatcgtatcggccaaactcaccctccaaggtagtccagtagagagtgttgggatcatcggcagccatgtccagaccagacaatggaacatcgtctgacgttgaatctggggcgtaccgttccaccgatgttgtcttgtccaggtccatttctcggatagaactgtcgtagctggcggtatatagatgcgtcggcttggatgggtggatcaccatggaacttattgtccgggtatgtggcttgagggtcgttaggactgggtcagggtcatcgtcctcttcatcttcgtcttcctgcttcaccgaggtcggcttttcctgtgatgcgtccaggatgccgagatgacccatcttgtctccagcaaagattaatggcttggtctccgaagggtggaatgtcatggtatacactctctcgggggtgagcttgattcctataccacaattagcatacgaaagcacacgcttgcgcagcaagtgtaaatcatacggttaggctcccaagcctcccacagctgcaattcactcatttcctttctcaaagctttcaattccttatccgttgtcttcttgatatcatcatcgccaaacgtccgctggtaaggcaccgcgacgcccttcgtaacaacatccacaccaagcaaaccatccccactaagcttttggcccgaaacaaatatgtcattcagtgagaatgaatccgactttctcaccctcttggccctctccgcctcctgataagcctggtgctgctcctcagctttccgtttcgccacctcactatccgccgcaatacccctcagacgtgaggacatgcgccgcggcgcaggtgactcctcttccttcttgaccttcttcggggccggttttttcttcgtctttgcctggctccccgtcgcgcgatttggcaaagtcggcgtgaagacggattgcgcatttagcgataactgcttgagaagcgcatcgcgctccgcgatattcgcaagccgttgcttttcgaaatcggatatctcttcgttacccatgttgagatgctggatatatatatatatgttgcgagtgtttgcgctgctctgaattcgtccggtatagcaattggtttttgcgcaccttgcgccggcgcgaataaagttcaaaaacgcgcgcaggcatcgcgctatcacgtgagtgttcggagcggtaattggcttttgtctgcgttatatctccgtcgaagctaaggcaaaaagttgggacataaagtttcatcatcgctggatttctcgactaatagacgcttgtttattttttctacaaccattttaataggttatttgcaaagcatgctgaaagctttttcatttctgcaatagaactttccagtgtttttgtctatacgttcgctatgagtgggcatattcatcgttcgttgctagcagtgacaacacgcaattcactcgctccgttcctttatcagactcgcacgctctctggctcttttcctcatccgctacaatgccatacacaggcatactctacttcgagctccaatacccccgaagaccagtcccggacagaatcttcccaaaatgacagcagcgcaaatacgccagcagactcacagccccagaccgagcacagcaatgaaccaacagaacgacgcagttacttgcacaaacgagctgccatggcctcgaggaatgctccccgtttaaaaccgaatcctcttaccatgacccgcggcgagaagcaagtgttcagcgatctgctggaacagctgggggctgttcagaaagatacaacgacagccgaaacgcagaagccggagctgagtgaggaggacaagaacgaaatggcgcagatctcggagattttcgaggaggtgcttaaggacataaagcagaagaaaaaacggaaaaccgcgacgacgggttccgcggatgggcaatccgcagacacagataccccggttacacttcggaatctggagttgcaggagaggctccggaagtctgagtacagtagtgaggatatcacggagctgctggagagcaatcagatatccatggaggaggcgattgagttggttgtgaagaaagaggcgggaaagattgagaacgctctccgggcagccattgacgagggcaaagaagatacgggagtgtgggacatctgcagagaaagaatattctccatgctgcagcacctcggagatgtccgtttagcccagggtcttggtatggtccaagataagaaccaagcggccgatatccctactgctactacggatacctctcatctggaggttcccgagtcggtcgcggtggaacccgtcgtcacggctctatatcccaagatgctcctcgtggctttccgtcttctcaacctgcacttccccaattccccgcttatcagtcaattccgagccacgatcaagtcgcatggccgtgcctctgccgttctgggtagctcgacaggactctacaatgagctgatctacttctactggcgcggctgccatgatatccccggggttgtttctctcctgcgggagatggaggtgatcggcgtagagcccaacgatcgcacgtgcggactgttaactggaatcgtcaaccagcgtgaccgggacttgaagcagcattggaaacggatgcgtaatgagaagcgtggcccgcgccgtgagccgtggtgggatctggcgccgaaccggaaggccgtctgcgagttactcggaccagaggggtggatgcaccggattgagcgacgagtacaggagaaaagaccttcacggtagttgcttgtcgcacatgtcccgaaaacatgaacatactgtatattaagacaatcacataatagaaacatataaacacccaccaagaccggacatagtaatagtacaaatcatacagggctgccacccattaaatcttcaatccccagctcctccccagccctatagctgtcgaccccacaaaccctaaacactgcttaaatccggtcaacttctccccgatagcagagctatcctcaacacgccgctcaacgaacgcctccgtctcagaaagaccaggactctgatcccgggtcataaccacctccgacgaagcataaatcgccgcaacagacaaccgcttcgtataccacgacgcatcaaccgaagcatcgccagcgagcgtcaagatctccgacgaaagcgcatgcaactccgacaatgacagaggaatattacccgccagcgacataagcgccagggcctagaataaatcaaaatatcagatatcagccacaatccataaccgcaatcagaaccattgcgtctcaatcacccggggtagatagcagaaatgcgatagacacgggagcaacatacatcctgccattgatgccttatctcggtattcattctcaacctctccatgatcaagagcttcgtcttctcctccacggtcaatttcaatccggccttcacccgctcatccttttcgaagagtccattgtccacgcttgcgcgcaataatcctcggcggcttgctagccagaataaaaccaggtcaaactctccgcgcgggagcaattgcaccgagacgtctaggaagccgctatcgcgggcgccgagggtgagggcgtcgcgggtgaagccgtgggtcgggacatggcggagcgcagcggagaggatggtagtttgggagttggtgtattcgtgaggtggcgggtcagggtggtgttcagagtgataggatcgtctggttggttgtgaaatgggagaggatgtgaggtgtgctggagtaggttgacggcgggctggtcgggtttgatgatggagttggcgagtgcattggggaattatggagcgggtggtggtgcgaagagtggttagttggcgcttggaggttgataggatggctgcgtggcagcgggttagatggtgcggttgtgccatggttattgggtgttcgtgttttgatgtttggtcgttgcgatagagggttcaggtgttgtcggaacttattttgttggattttctcgggtgggcttaagcggtggcctgagcggagccaagattggacctcttcttgtcagatgatgtccgattgtgggttgctttctgaggtaccgggggttttggaatgtttaattctttcttttaggtcattgtgatttggttttctagggtgagggctattggattgataggatgctcatgttcttaccgggtatagggtgagggtgattacttttacttcttgtgtattggaggaatgagcatggccaattgtatgtctgtatgcatgtgcgattgactgtcgttgagtactagaatctctcggatgcacatcgatctccatggggttattcctggttagtatggtgctggattaatatatggtatatagtatgtacaattatctaaaatgtagaagccaaggtcaacggttatctagctgatttcctatttgggaacatcttcctatcgtgacatctgatatgaggactcaatctatatcacaatgtatagggattagcgtaacgagataaaaaagaagaagaaaaataagagcttcgagtctaagaagggttgttaaaggtttgacttgcattttgaatctctagtagaaattactgccagcccatggctatgcagagctttgatcccagtgggattaggaaatagatgagaatttaataatatccaaggatgaacaattattgatttcatcagaatgacagtcaagctgcatctcatctcatctcatctcatctcatctgcgaagggatcgatgttgaacgcatgattacggagtctcttaattgtttgtttcctgccgcctttcatttcatttccccggcggcataattaatgtaagtctctgcctctgcttctctccctctcctctcttccacttgtcattgtcttagttccccccttctctttccccaattcttaatacccacccccgcgtggaagtaacattgaccggccgaggagagtgagaacagacctcaagaagattaagaaagaaaggccaacttgcaaccatcacccctgccgatattacagtgtcgactgaactttccggagggtctccgttttcgtttccaatcgattattattgaattttaatttgtttttctattttcctttttacccagttcccctttttcttctcgtccttctgatttgctctggaatccggtttgggtgttgagcattcgcccattcagagtcgacattctccagtgacaacagtccagaccttccaaataacacaacaacacatctcctcctctcattctcctccccattctcccctcttgattgcagcatcacagatcatgggtgggtgacttaattctttttctttggtgtgctttctttgttggtggtttcttttctttttttaaaattactttctgttttgtctcatgcatttgcttatctgcataactctatgaccgtttgttggttctattttgtttttatcaggatgagtgattattatcattctggtttactatcaaaacatcccatcaacatcagcacccccatccccatgtccttatgccaccttgtttacattcccactccttctgtttgtcttgtaatctagaatgatgggtttcaatgggtttctagaacccaattgatcctcctatgcccactggagactgacacctgccatacttgccctggtttctgtctctctccccctccccttcttggccatttgatagctgcagcaccaccggcatcagtcatgaaaggtcacctcacttccgggcttcccactactgtaggaaccggccgtgcctgtttttgactttgtcccttccccctcttatgccgtgccttggactagtagccttactctccacccatcatcgtccaccccctcccatcccggtctttaagccggctcctcggaggtcgaaagaagggtcagtccatctaaacctcttctgacttacttgattacccaaagctatccaccgggcagaaaggcgtgcattttgctttcccacgggaacgccaatcataccgcgtgctcctttcatcttgtcctccccgtcccgagtgaaggtctgacagactggtctgaattggacgggcgcattcattcgcattcattgctttcctcgttgccctatttgtttttttattttttatttttttctaaccctgcgactttgcttttttattcttccctctcaccccgccgttaccctcctttacctcttctctctcactcttacaacatcttcctctcttctcttcctctctctctccttcttactctctaatcgttcctctattcttgagttccccatccacgtcattactggtatttctttgtcttctggctttgatttcctcgtgttctgaggatcgtcaaacttcttgcttacatttaaggtataatctgcagctgacgtttaccgaccatatcaagtaagtattgtccctccacaccgttcgatctagcatcgtttgatatctcctttgtgatgatggttttatttgcttgatgatcttgccttttctcatttttgtcttgccctctgttgttatattgtctcgttcttgcgcgatatttggttcactcaagaaaccataacctatccggaccgggttggggggggggaccatggctcgctgagggttccaactataccagccggtttgagacagtgggcgtttggactgcagatatcaccgcgtttggtttgcacggtggcagttcactaaatcacatgaaacagttatatctggtgtttttttgttctcattcctttgatccctttttttttttttttcccaacccaacaatcagaagagagagacaccctggtggcagtgcattagcttcaggtttgaaggaaactccccacctgtctcgcgggtcccgtcctccgggtcctccccattattagtggccactccattgctttgttaagcgtcctcggccacgtcacctgacttgggcttctcctcttcccggaattcaatggtgtcaaggctgccttcggtcccaaggtgtcggaacacccaattgcaaccctggaaagccaccgcgcagatctcattctccattcactcgccgtcatacttttctagccattcctatccctgactctttcttttcccttttctttccctttcttcctcccacctgtgtcgatgccggccgattactacgatactgaccacgcgcagcgcgagaggtctcgttcaccccgtcgtcgttcgcgcagccctcgacgtagccgtcgctcttattcgcctcggagtcgctctcggagtcgtgacgattatcgccgcagtgaacgccgttcccgttcgcctatgagtgctgcaccaggtgcctctggaggacattctggttctggttacggtggacgcagcagctacccgccgcctccgagatcgtttgaggaccgcgctgtcgccaaagaacaaatgatgcaagcagtgcgcgagtcttcccagcaagaccgtcgggtctatgtgggaaacctttcctacgatgtcaagtggcaccacttgaaagattttatgagacagggtgagcagggtcatattgtgtcggatgtgtgatgcgctttttgttggattggaatccgtggctgacttggagggggactatctttccgcgccgtacagctggtgaggtcatctttgccgacgtcttattacttcccaatggaatgtcgaaggtgggcgccaatgcgtagtgtggctggttccttttcccctttgtgtttctggcttttttccatttcccccgttggttcgttttgatggactgtttgggttgacgggctgggcctggccgtccgggatactgtagggatgcgggtaggtttttgcacgatgccccgttatgcccatctgggagaccttgctgatcctcgattaggattgtggaatacgcaacgagggagcaagcgcaaaatgcggtcaacacgctcagcaaccagaaccttatgggtcgtctagtctacgttcgcgaggtatgtcgagcccttccatgcctccacagcgggctcccccatgtgctgacagatctcaggaccgtgaacccgaacctcgttttaccggtggcccttctcgtggggatttcggcggtggtggccgcggcggtttcggtggtggaggtgggggtggttacggcggtggagctggtggaagacagctctacgtgtccaatgtttgttgcccccctcctcataccttggatgtaatgcgagatcacgcacggcaagagatattgacttaggcacgtttagcttccattcaatgttggctggcaggacctgaaggatcttttccgccaagcaggtaagtgcaatacagagggcttccctcaaaacggcctcgtttgccaaccctcactcccatcctgcatccatgattgacccaagaacactttacagctcagcaaggcgccgtcatccgtgccgatgttcacaccgatgctactggacgtcccaagggctccggcattgtcgcctttgaatctccggaggatgcccgtaatgctatccagcagttcaatggctacgattggcagggtcgggctttggaggttcgtgaggatcgctttgctggtgccgggccaggcggatttggaggccgcggtggcttcggtggtggctttggccgtggtggtttcggtggtcgtggcggcttcggcggtggccgtggcggctttggcggattcggaggtcgtggtggctacggtggtggctacggtggacctcctggtggtgctggtggccctggcttcgagggtgccccttcggttccccccaacccgttcacggattttgcaacctccggaggcgagaagggcccggttatctatgtccgcaacgtaagcctcctttcacgcccaactatcgtcgccgattcgtttactgatgtgtggtaatcatagctgccctggtctacctgcaacgaagatctggtcgatctgttctcgactattggaaaggttgatcgtgcggagattcagtacgagcccaatggtcgctctcgcggcacgggtgtcgtccagtttgacaacgcagagacagcagaaactgcgattggtatgttttccaggctgcatcttccactgcaaacactgacatttgtatagccaagttcaccggttatcaatacggtggccgtccgctcggcatcacttttgtcaagtacatgaatgcaggcgctggccccgtagacgccatggagggtgccgagccgactggcggtatcacccaggaccagatcatgtaatagtatcgtattcttccccctttcgacggaccgatgaggtcgaaaagtttgcgatgtaattacaccccggtcaaatgattccatgaccaagtattcgtgtggacgtgctgatgctattctaccgtttttgatgcctctgtttttaccttgtttgttttcttctctggcgatctggttctgtgggacaaatcggaccttgattctgcttactttacgtttcttctacgggtgagtttgtgattgaccatggtctggctttgctctgtatcccacatcttgggtggggtttccactagaagaattcggttctggagaggctccttacttcattttcgagttggctttggtagaaattgcaatacccggtcgtttagtgttacgccaatgccaatattctcgccgttcgcggcgttagtttgacaatctaattgctcactttacccacaactctaccatctggtgtctgccatcatgatatatttcagaaagcactgctgaaacctacgtcagagcgtcacaatggcgcacctacatcaaagaaagtttcctcatctataaacgtgcaagtatatacaaactacataagctggtgttccgaaatcatgcaacaacaaggctagcaagacggtcacttccatacttttccaatttgtataattctcagtacgttgctccctaatcaatgatgatcgcagagctgtccgcaatacgaacccgtagataaccactcctacattggtatcctccaccatatatttgctacggtgtctaacctcatacctaggcttacctccttcaaattactgaaccaggtatagggctaaaagatccctacctttgccttccaagtcattggaatatatggcatacataccacactactgtctacaaactgaacaaatagaaaaagagactaaatgaccaaagaacttcatcccaacataatgatatttctcacgcataacctaaagttttcttgtataactcataaccactcattgaacgaagcgcaaagcaaaacaatcgatctagtaatttgatcgcgtaaaagccaaagccaaagcatcacatccgaaagaccgtctccggagctttcgataggaaaagatgaaaatggactcgaactttgatggaaatgaaaacgccaggggaataacaaaaaggggggatataatatgatacagacgaaggggaatattgatgaaactgaaactgaaactcaggccagacgagacaaaaggaaattcgaacaaaggaaaagcataaccataacataaccacgcacccctcctatgaaaccctgacccacgccataccttgtgaattccgtggatactgatcctgtacctgttacctgtacgcctgcttatccgatcatgtgtccaaccttgtggactcgaacgccagaaatgatcattctttgtgttttctttgtgcatgggaaaactgaatgaccgttaaaaacaaagggaagccgtcacaacaaaggaaataagcaaaaaaggaaaaataaaaagaggcagattgtaacaaaggagtgaatgggcatgtatgtatttgaaacatacatgctactggtcggtggttgtaagtatttacggaagaattgaaatgtgacaggtgagatcagttcacctgccggtgagccagccttattggccatccaagcatctatgctgggacgttggctggtgggtagtgacccggaatcttaagctcgagggtggacacgctgtttttggtctgagcgggaggacgcctgccctcattcgactcgacaatactaggaccaggagcgttgatgggcactgccgtggatgaagctgtacggatagagggaggcccttgtactttgttccagctgtcagtcataggatcatcgtgtccgtgtgatattgattctggtctctcatctatcgaggtggggacagtgttgagagtatgatctgtcacatttgtagtggtaggcgcagtggaggtgctttcgccccgatttctctgtcgtgtgagagagtgttcacgagaattggttgtcttcaatcctgcaatcaagttgggagccatattccctctctcaaatccggcagtatcttgagtgttatcatagatttgctgagcctgcacttgcttctgatggccggccgtgttcatccaagcgccataatagctgtcgtgtctctcgaacggctggcgcgtggcttcacccgcctgacttgaaggctgcacctggtcgatatccatgtcgcgttcagatatggagtggcgtgtgctttggaggggtgatttggcatcaggcaacgatccgacagccgccaacagatctctctcgccggagctctctccacttgacggcgacagtggggcctccaaatggcggtctatatgcacatcactggggaaacggccgcccgcttcacgcggttgagatgctgggcgttcttggtttaaaaccactgaccccgccgagtagggcgtgcggtctgcttcatcctcatccataaccctatcactgctcgtggacgtccgcccgaaacttgcaccacttacagtgcgcacatgtctcctaacgaacgcattccttgcttcaccggtcttggagatcaggctttcgacgtcttcgtaccacgccttcattgtctcgtgcgactcggcacggaagacccatgagtggccccggtgcatcgtccccgtttgccgccctttcaacataaatttatgggatgtggaatccggttgcgaatgcgaaccaagcttttgctccgggagatacagcgacatcactggtgtttgccatgccactcgatcggctgacttgaactcgtgaagatgagtcggagacaaaacatacctatatcaagttagtgacaagacaaacgttgagaagggaaggatgagacccaccagccaggcgtgtagctcttgagatatttgctcttacgttccagcatacccgatctgacctctgcagcggcgggatggtctttaccagggtaggagatattctctatgtctcgaaggggaactcgcggatcgactagctcgtcggtctctgcgatgaacgagttccattcgtggtcgtgtggcatcgagatgggccctgctcgaagcttctcggcggcatcgtacgcctcgtcggcttcccgtgtgaggatgttggcgtaagttttgtatgccttctgaatttcgctaaccacgatggattccaattcgcgacccgaattttccaaattcagaaacgcctgcatcacatgttagtaactatatgtcaatgttactctcaatgcgaaatcccataccctatgcaagtagttttcctcttcaatctgcttttcaatctgcttgtcgacactcaaacggacgataaatgggtctccttttccggctgtggccgccggatccgtgtcgaccaggcctagggcttcgtgcagatgacggacggatttgcgggtggcgtcaacctccttatctaccgagtttcgaaagtcgcccgaaagactcctgatctccttggttttcttttgcaggtcgtttcggagtcccattagctgagcgaccaactcgttttccacctcagcagccttgctcgcttcctgatatgcctgtttatggaaattacgcagaatatcggtcgcatcagcaaggccgccggatttgagaaaagtgggaggtaacgctgaattgttgattatattcgatgccgacatgaatagtttggatcgagtttcgtaggatttctggagttctttaaagaacacaatgagatcctttaggaccttacgccaagctgatgtatgtcagaaacacaggttcctgtgtacaaagggtacacagctgcgctgtgctacagaaaaagccataccttgaaagcgatctgctaaaacttccgtcgggtttccattcgtaggaacagggatgtagaatgcgctgttctgatcttcggcgccgtcgacgctatacttctccttatcgcctaggactagactcctcacacttcccgcgcgcaggctcctcttactcccgctgcgtcgcatactgcctctcttgctgagggaggacttctttttcaaagtaccggatcgcgtgggtgtcgcggagcgggagttggacatctgagatgcggaacgctgtacggcggcggatgacgggccctcgaagacgacggaaccacgttggctggcgacatcgaactcctcatgaaatttaccgttctgcgtgaccgggggttcagcgacagcaccagtagcaaggttgtagccggagttggaggctataaaggagttcggtctagaagcagaccgcgatccatagccccgacctgagaatatggaatttgcgggctgtgagatggcgccgtaagtgtcctgcagaggcgtctgcgaccggaccactgtggccatggttgatagggtggaagaagaggaggagggggagggggagggggcggcggcgaatggctttcaacaaggcgagcaattgggcggtgcaaaccaggcccgtgatcgagagagtgcctaaagtccgacggatggtcgatgcgggccgagatttttggtgagaagtataaccagagatatgggggtgtatgtatgtatgtatatgtatggagtagtgttcaagaggttttcgttttttctagaaggcaaaaagaaggggaataggagaaaatgatcaacaagagaaagtaaaaaaagaaaacctatatgagatttaagaaaaaaaaaaaaagaaaaaggagataatttaaaaaaagagtccagatcgggtaatgccccaattcccaagataaaccaccagaaacggctttctggaattggttacccagcgaacgggggtttgggacgtgacctccttgaactaaaggcgcggactaaaaagcgtccagagggtctggagcgaactgtttgcggggagttcaagtaaaagggtaacgactctcctaatcttcggcgatagtgtcgctgtcgtcgtactctgtccggtagtagtcacggccgatccctcattagaatgtgccccaccgggtctactattaaaggattcggcgctgggatgcgatcaataatcagaatagccgtctttttggcctggcaggaaaaccaaatcatgcgatatttgagttgtggttggtaaaggagaaaaagggcatcgaggaggtcaaaaagtacgattgcagtgttcaattcagctgagagagtgaggggttctctaagtaataagttctatctagtccttggacggttccggatgacgtctacgcccggcgaaaagacttcaaggcagatgcgacgttatgacgaccaagaactactactggttcccccaaaacagtggaacggactccccggacccgaaccaatcttcggccttcgtgaacaaacgggatcttgacttcacgagcattgattgggaaagaaaagaggagaagaagaaagtagaagagagagaatgggagtgtttgtgtgtatgtgtgtgtgtgtgtgtgtgtgagagagagagagagagagagagagaggcttccatggaatggaaggtaataatgacataccgaggtagaaaatattttcaacctccagcaatgaaggatggcagctgaaggagaatgttcatcataaaaattccaaagtataataattaggttacttacctaggagaatacttaactctctgtactacagtactagtagttctactgccaatctctattgtttggatgaaagagaacaaataaaagaagagtatggagtaaatccctaattaccactttttaaaacgtcaaataataatgttaccgactcagggttagtgaggttggtatactagtactagtagtagtaagtacccatgtccctcagtgtatcctcctttttcctttaattatactatttcgtcgtagaaagcgtactaagtcagagaatgctggtttgattaccatttctattattaaaaatgccgttgcctgttcaccagcaacgaaccatttttctgcttgggtcgattcaggagtatgcagtagtgtcgagcctatattgatttaatcaatatccaaccagacagaaacaattctcaagatctagcgaggcgaataattacgggactgtcgccaaccactccgtagtccaaatgaaaatatccgtcgtcatcgtcaccatcaccagttttctcaaatcatttcgctcccctgggaccgagtggacagtggctgggtcaacgctggagaggctgacctgtggctatggttctcccccttggctcatatcaatctatacgccaatcaaataccccggtccatctcccagtggatcgatttaatcacacggaggaaatcatcattgactgaatcttcctagcgtctgcataattgttcttcatgtcttcatttggttcctctcccacccctttttcttccttccgtccagtggcaatatctccactaatttgactcattcctataggttcagggagaaaaaggagatattcgggccgtgctcttgacgtcctctccaggatgtggtgaggcaacaattacagtagactcctccgagaagtttgaaaaaggaaaggaaataaagaaaatacaaaaaaaaaaccttctattcgacgtcatgcacggttcatcgctttccatgtcgatcaagccggaaggtttccagaagactggttcgggcagattcccgttcatagttacagaaatactcctaattgaattttccctcctacaatatacaaaagtacatattttactccatagtacgtacgactaagtgtacggagtatcgaagcgaaggatgatgatccacgtccttcccccttttcgtaaacactttagttcctccacccactcccttattcatgtttacttctttccatgagatccctcagaagggtttggagttgtgacagaccttgcagatacctgtgattagtcgatcctgttgtaaaacctgctggtctgattcatggagttacatctcccagtatcgtaccacagaaaccaccgccaccctcattgtatacattagtccacccccccaaatcaatcatagggtaaaactctagtatttgcagccaaggttgtctgcttgctgccctatggttacggcagcgagtcaaggaggatgatatcatatcccctgacttcccctgcatcgaccttgcattccttgagtttgcttcaatagattgatagtcgttctgtcaagttccatagatcatatggataggcgttccgggattcccgctgtctcttacattatccttaggtcagcccaatgcgggtggatacctgaatattaaggctggactgatttgataaatccgccatgtgattggtcacttcgctccagactccgtcatggatagttgtaccataccaccttacatagtgcctctacaagcttgtatcaacattatgaagcttaacaatctagggcctgtaatcgtttcaatatttccctttgctctattttaggacatgcagtttatcctctgagcatgggctgatccttgtcgcatattcttgcagatagaccaccgttggtctccaacgtccctcgctgcttcactctaaatataatcgcaatgcacattgtagtatgacctggcatacatagtccagcatataatgcgttggccgtgcgcaattggtcccttacaccggaattgtggtcacgccgccacccatgttcctacgttcatgttggtcaagtgattaaaagatatcaacagagaaaacatgaccaaagaacaatgcaatctccagtaaagaattttgccaaagttgctagctaaacgtgttcgacatttaagggtaattttacacaaggatactgggaatcggcagattggaaagagacctggaaaccaaactatattcatgaagcgggagcctgggatgtggggacctcgataccgtatgcttccttgattctctgtgcccgtctctcggcgtagccagggccatagagacctatagatcacatcagcgataatgtaactttccattgaagccatggcagatttgatgaacatacctcgtccctcacccaactcggcaagggtctgctcgcccgaggttctgtatgacttccgcaattgctcccgacgctcgaactcgtcaatatcggcgttcttcttgtaaccccacaacgatccgccagtgtattcgaaagcgcccatgaaggttgccagtgcagcaccgtaaccgagaagggcggggaaagtccgggctgcacagctgtcagaataacgtgatgtaattgccaattgaaagaggatatgaacacagacctcgtagacccaggattgtaccagagaagaaaccacccaatgcgacgttccagtgatcctccttctcccgcaggttggcggacgcagtcttcacgaactcataggtacctcccattgccgctggataacagttgtcagcaaagtcgagtataacactgaccaattccaattgcatccataccgaatacaccgatcgtgccgccgcttctcacgaagacaccgaatggcccaacgttcttcctggtgagggtgttctgaactgccgaggcgaagagacccactccaccagtgagcatagtggtcttcattgccgcctggatcgcatccttaggatggtagctgtgatcttcagtatgtccagccatggtggcggttgaatctggaatgggcttctgcttgtagtgggcgagtcgttcagacggttcgctgggattttgggaagtcgcggtttctgccatgcgacaccgccttcccgggctttcctagagcttcatgtttagtgatgggagaacagagggctttgttcgccatacgactttgtcggtccctttctttgaggtattaaatttatgacctatagtaactgttccatctttcagaacaatctcagaagtcaaccgtgttggcggtggtgaatccgtcaccaaagttgccgtccgcttgctccaactgcagtgggctccccgccagtccaactgtcaacgctcattctattagaatcgaatgatttcttggctttcaggtgatcaatcattgcagatctacctctaagagcaaaatcataaatcccatctttatggaaaaattcctttgaataactctggatccctcggcctgatccccgcctacagtgagctcaaacgagcgtccccatgacgtcctttcaacggtcaggtatgtagcttcgcccgatgcgggagcgcattgctttaccatgcacacagtactgacatggacaacccgacgaccaggcaagaccgccccccgtcttgtacaagatatatacgaatatgatcctgctcaccctccagcgaccggccgcaatctgctcgcggacgtcccgccagtgtttcctgaatattacaatggaccgctagaacatatctcatcggcggcatgccgccataattttgtatcgaaaccagcacagagttatgtccctcagtcggaacaaggcaacactggagcctctacaaaggtgtcggctgtgtgcttgatgtgccgctatcatctgcaagttgaggtgagctctacgcccggtattggtcaacctagcacgagattttcagaccacgtacatcatctggtatataagtccggaaagcacagaggcggcgcagcgccggaggaggtcagtcccaagggacagatgctggagatgttccattatgaatgttcatatttgtcttgctccgtcgcagtatctttgcggttcgcctcacctgtgcttaatgatgaccgggtgcgactgttgacagaccccgaagtgctgcgacagcgggcgaacgaggcatttgcagcccatcctgaccgtctggaaggagttgctccacccacacctatcaatgtcttgctgaacctgcgtacatatatcagcaacgctcttcttgatagccaacaaagcaagtcaatctcagcagttaataaaagatttatgacgtgtttcggagttgaagggaagccttgcaaagacctgttagaattcctgggatttagctctaaggtttgtaaacttgcactggagtatgtgcttgcgatttgcaatgtgattaatacttcgaccagaacgaaggcttttgggaacctcctcgaccgaatccgtgggcagagtttccctatcgcgatcaactcaagatatttctcgatgacgttatacacgaacttacagcgctcatcgaacagaggccagtggtagagaagaagggccaccagctagaatttattcgtcaaccggtcttcaacgatcttctctatgcactgggatctttggactgtaggttttatgccagcaactcctaccatgacattcatgttaataaaatttagacccgaaggcctcacgatcaagtgaatttcagatggctcctcaaccgtgtgtctcatctaagaattgcgcccttgtgtacgaatgctgatcattcaacagttactacgaagacctgggtgttgtcgaggacatggcggcttcatcaatcatagaggcttttaaccgacaagtctcggtggatcctgctaggactcctgtctacttgaagtgtctgaagtcaatcgggattctcagaggaggagaagatggttctcttatagaccaggcagttcaggtagcctactccgaagggaaatataccgaagaggacgtggttgatgcctacaagtactttggcctaagtcacgacgatcagcgactcacggaagaaagcatcattgggaaattctatgcttatctaggtgccactactgctgttcaggagactgagacccgcagacaactatggaggataggagatagcaggcggagtgagcggatcaaggcagcagcggaagaaagtacgactgagttgacccaaccaaaatagttttaaatggcataactaacggcaataggggtgtcaactgctgagcaggcccgggttttccttggcgtcagcgctgatacgcctgatgattttgttatggcagtttacacagctaaagtatttcttccatgacttatatccagcttagagtctttgtgtgctgacttcactcaaggtcaatgacaacccatcgagccgggatcttgctcgccgtgcagtccagctgctagcagaagagcgaaaatcggaagccttgaaacattttctcaagacaggcgaaatgactgccggtgagatggacgttgctgatgcctaccgtctccttcagatacccgaccgcaccgtggatgagggagcaatcatggcagcatacactatctgtgtggatgaagctccagcacaagctgagaactacaatcaggcgttgcggattatcgcgaaagataagaatagccctctgctgagcaatatggtttctggttctaccactaaacctgaccgtaacttggctgaatggccagttggactgcagaatattggcaatacctgctacctcaacagtctgttgcaattctatttttcaattcgtccataccgtgatatggtcttggacttcgagaaattcaaaatggagataaatgaggacatgttgggccaaaaacaggtggggtctcgcaaggtttcgcaaaaggaggttgagcagtcccaacgttgtaagtgatattcttgctttcttgagtatgcgtgttggatttgaaaagctcacgactatctgctctagtccttagcgagttgcgaactcttttcaatgacatgatcactgccccagcaacttacgttattcccacccaggagctggcgcggttgacgctgatcagcccgtctaacgaagccgctattcgtcgccggtcgacgctgtctggaatcagacctagtgctctcggtgaaatcaacggtgtgccagttatgggacctctcgggcccccacagctgactccggaaagtgaagtcaaggggcccatagctcccgagccagagaaaccccaacgttcaacgacaagcgatgttgatagcgaggcaactcttgtttctgatggcgccaggatcgatgccacagtcccgtcttctaatgacaaggaacccgagcctctagttacagatcctacaaagatggacgtgcaggacgtgttaacccctgaggcagttgagtaccaaccatccgacaaaccgacttctggtgagcagaatgagttgtctagccagcctcctccagttcctccacggcctggtcctcaacctgacccgcagaagcaacttatagaggaagtagagattggagctcagcaggatgtgacagaagtaatcaataatgtcctgttccagagtcaatgtgccatcaagccaatttcgcttgctccagacggtgagcagctcgatcaggtgaaagagtgagtttcaatacctctatatgtcaaggtctgggctaacttatactctccttcaatagcttgttttacggcaaagccaagtcctacatccaaacaactgaaggagtgcgatcaaaggaagaatggtggtgtgatataaagatcgacgtcgccactggatcacgagatatctatgctgccattgacggtgcttttgacgtccagaaagttagcgtaggtaattcggtggcggaacagtttagtgcaatcagcaagctgccgccagttctccaggttcaggtccagcgtgtccagttcgatcctgtcaagaagcgctccttcaagtccacccaccatttagaattgaaggagactatctaccttgatcggtatatggacacccaacaacccgaaattttgaatcgccgtcgtcagtgttgggaatggaaaaatgcattaagaacgctcgaggctcgtcgagcagagttgcaacgccaaagtgtatgaaccaaacgaaggatggttaccatcctcagcaaagagatgtgctaattcctcgcaggaagctgatggcctggacataccgagcttgttcgacaatgccaaggatgttctagaagagctgaactctatgaaggaggaccccgagatcgcagcagatgcggttcctatcaattcagaacttatacctgagcttaatcaactttcccagatagcgagggcagagctgaactgtaagtgtcacattactcgttctttactcccatctatcctaagctcctatattgtttcgtcctgggttgcttgttgtgaacaattatactaacatgtcctctagacattgagcaggagatcaaggatctacaaattatgatctcaagccagtttgctgactacaaacatttggcctatcgtctctatgctgtcttcgttcatcatggctccgttgaattcgggcactactacatttacatctgtgatttcgaacggaatatttggcggaaatataacgacaactatgtcactgaagtgcacgacctggatgaaatattcacgagccaggaccgccaaaatcccccgactccgtacttcttagtatacgtcaatgcgactatgaaggaccgtctagtcagtcctctttgcagggagatactcgagtctcccccagaggatcaactgagcggggatggaggaattgctacggagggagttactccgccgacggttgcagaagatgtggacatgaacccaccggcatacgatgagatatgggctgacaaaggcacatcaggtacggaagataaccaccatatagaagataaaacgggccccacaggtgtggggggtaatgaggtcactggcagagggccgtcaaacaaagacactgacttccatgatgtgcaatggtaggctctgaaacaacacttccgaccggagtcgcatcactgaatccattgaaacgaaaagggttagatgatatagctggctcaactagctaagctgggtggcactctgtgcagtgacatctgaccctgatcccgtggttggtgcgcttatattcatgatgctgcctatgtcatcctttctatgctgtatagacgaggtttcccggttatccttagcgaaacatgttgttttgaagcgaaggctgcggaaacattcattgatcaagacgacttctttgccttcgctatacttgctgtgctcgaaccaaatgaggacatacttaattcgaattgccttggacttttaagcctcgggctatccctgttcatgcaaatatctactacaagccgcccaaacatgcatttacagaatcttcatgttagttgtgtgatgttgagttattgttggctgtgcatggcagcgggtcggtacttattgttcctgtaaatagcggttgataccattagttatgactgtctatgatgtacaatgacatttgtctatgtcttatataacctggttgtagtatgctctaatctaaacacgtgactcgaactgatcgcttagatggatccgacgggcgggccgcggatcggaaacggaacattgcccgccatcggcagtccacatcggcagtgcaacatgctgcctccattccggaagttgacaagctgtaggctgatagaattgggatttggcgtgaataatacagattgcttttgtggtagtagttgtgtaaagggagcgtggtaatgactttaagtaaagcaagtgacggataagagcttgttgtccgatctctaacgaatgcggggaaattccggggtactaaggaagggttgataacacccgttacgggtatctttccgcacctccgtcgcaagccgctcttggtttccgaagacagtatatatccgttcgtacgcgctgctccttagctcaaaagcgtaactgggaacatcttgaactactacttctcagtgtcttcttaattctcacgaagagactgacgcctgagtttcattagttgcgactcttcacagcagactgtagtgctctctgtgcgtctaatcccgttaggctctcagttcaccatgccttcacaagttgctacgtgcctgcgccttgcgcggcaattctctgcagacccgagcaaggtagtgttaccaatacagacacctcgaagcgggatcatactgacgagtctcctactagcatcaacgattccttgcgcgtgcattttccagcagcgtccgtcgctctgagatcaacaaggtcgtatcttctgcagaattagcaatcaaggacatgaagtccaactcgaccgttctggcaggtggatttggtctctctggtgtaccggacactctaatcaatgctgtgcgagcgaacccttcgatcaccggattgacggtggtcagcaataacgccggtgtggacggagctggtcttggccttcttctcgaatccaagcagatctcgaagatgattgccagctatgtgggcgagaacaagacctttgagcgcatgtacctaacgggcgagattgaattggagttgacaccacagggtaccttggctgagcgttgtcggtcgggcggtcacggaatcccggctttctacacacctgccgcttttggtacagttgtgcagacaggtgagctgcctttgaggcacaatgccgatggcaccgtcgctctgcggagcaaaccccgcgatgtcaaggtctttgatggcaagagctatgtcatggaggagtctatcaagggtgactatgccttggtcaaggcttacaaagccgataaattgggcaactgccagttccgctatgctgcccagaacttcaacggggctatgggccgcaatgctaagatgaccatcgttgaggccgagcacatcgtcgagcccggtgagattgagccggctgctattcacctgcccggtatctacgtcaagcgtgttattcagagcacgacaccgaagaatatcgagaagtacacctttgccaaggaggagggtgaggacactgctgccctgggcaagggtgacaccgccgccaagcgtgaacgtattgtccgtcgtgcggctaaggaattcaagaacgggatgtacgcaaacttgggtattggtatgcccatgcttgcacccaacttcgtcgatccttccgtggaagtccagctccagtctgagaacggtattctgggattaggcccctaccctaagaagggccaggaagacccagatcttatcaacgctggaaaggagaccgttacactcgcacccggtgcggcttgctttggcagtgacgagtccttcggcatgatccgttcaggaagaatcgacttgaccattctgggcgccatgcaggtgagcgccagaggtgacttggctaactgtaagttcttctgcacgtgattttctcttgtactttatcatctgtccgtactaactgtggcattatagggatgttgcccggtaagatcaagggctttggcggtgctatggatctagtctccaacccctccgctacgaaggtggttgtcactatggagcacactgacaagaagggcaaccccaagattgtcaagcagtgcgagttccccttgaccggcaagacttgtgtcagccgtatcatcactgaactctgtgtctttgatgttgacttcactgacggtcttaccctggttgagcttgccgatggtgtcactgttgatgaggtccgcagcaagacagaagctccgttcaaggttgctgatgatgtgaagcccatgctgtgatcacgtcctgttatcatttttttgtttgcatgtctggatgtcaccatttcgcgaaaattatgggatttataagcgtatagtttgtgaagtcatgtcgggtacgggatctgttgtatataccatttcattccaaaaaatagttcagaccatttaaaaatatatgcgttggacaataatagtacattttccccaccagaaaatattaagacaaccgagaagcggcaagaataatctcttatccgcggtctatattcccatcgcaatacatagtagtacataacatagatatacaaactcctcaatccaaccctaatttccaattttgccaatattgcaataccttagctaaacctgaagagacccttcagccttgcgctcactctcccccaaaaatcccgtgtcggagcctctgagaactctttaatcacattgtcatagtagtctgggtttcctgtcggccgccgcagcttaggaggcaatggataccgtctggcatagcgatcttccagcagcgacgacagcgcattcagagaggcttctgagagaggtgggggtggcgattgtgacgactgttgttgttgttgcggctgcttagaagcgttctctgaggtttgggggaggtaggactgaaggtatgtctgaacggagacggctgaagggcggacatggtcagtgggccagtgtttgagaaggtgattgatgcgcgtgatagtttgggcctaaaacagttgtcaggttactgttggttgatctagtctggttgcaattcaagacttaccgatggcttggacatgatgtttgcgactgtgatgtatgagcgagaaaagcggtctgtccgggaaatccgaattttgtagaaactccaaaaatctgcggggttgtcccgaacaaatgcaattgattaagtgggttgcgatgtgttgttggagtagcgatatctaaattatttgatatgatctacacgggcaaaaagtcaagtcacggggggtgggcggaatgccccaggcagcagcagcggcggttctcagccactgacagacgctctctccactccgccatgtaatcgccctcatttccatcccatcctccatctacagtcgatccctttccatcttcatcatcactttccctcggacactctttctcccttgtcatctttgttggtaatactataaagcctctgtcgtgaaccccgatctactctctttaccgcccttcccctctctttccggatttcctttcctcgctcagctcgtcatgagctcgcagcgctatcaaagggtaagagtcgcccaccgccctggattggttgcaaattgcataggatttaccgataaattgtgaaatttctggtacgggttgctgattttgtgatttctaggtaaacgcccacgatgaagatgaagaaccgcaatcacaatcatcaatccctctccggggaacaccaaactccccccctccctcgtttcgctctcgttccacctctccatcatccagacgccttctccatgacgatcccctaaacaacgatgcggaccagacgctggccgacgcatttgatgacgagagcgactccgaagcggatgagccggatgaccgtcagcgactaatgcgggctcagccggaatcgcgaccagtggcagatagcagcagtgcgaccgctagttcctcatctggaatgggcaatgaacagcaacagtccagtgatccgcgtagtgggattcaaaggaggcagacaatcctaccgagtttcagcactggtagccgagtgatcagttcgacgaatgacggtgtctttgcgaacctggcggctaagccggagcgtggagagaaaactgaagaccttcctccggtatgtattcacctcgtgtttcgtgtggtgaacgatgcgtatttctattgatctcgtgctgacgccttgtgtatagtcctatgaagaggcggctgctgatgctacccctccgtactgggagactacgattttggccccaggtatttcatccgacgaggtgtacgtggatgggttgccagtggggtccgtgttttcgtttgtctggaacgccatgatctccatgtccttccaactggtcggtttcctcctgacctaccttctccatactacgcatgcagcgaagaacggaagtagggctggtctcggtcttactctcgtacaatacggattctacatgaaaggcggaagtgatacgaaaccagacgatggtacagaccaatacgtgacacctccggatcccaacagtcacaatttcgaccccagctccgtagccgatggatctgggagcgatggtggcggcggtggtgtttccgggatctccacgagtgaatggatttcgtacgttctcatgattgttggttggtttatcttaatccgcgctatcagcgactttctacgggcccgacgccacgagcagctggtgctgcaaagtcctgaccgaggccttcctgtgccgatcattgcaacaaatgaaagaacagagaccgttgtttaagttgccatcatagtgatctgcataacattgggcgggttggagccttggagcctgggcgttaattcttttcatctgctattatttgctttgtatgggtaatgcgcgctaattcccccgacggacgttccatgagacgtgaggtcctcatttcgattttctttgagcatgggaacacttgtaactatttgattagagataccaaatctgaaagacatagcacttggcattgatgccctatcgctgtccgtacgcgtgtatcattcgccagccaggcaaccttttttttccccttccctacaacccatttgcctcctcgccttgccttcccagcttcttattacccttcccaactcttaatttctatttatcattttaaatagcgcttgtccccaactatcttcacgatgcacgtaagtccagaccgacccgcgatggcagagtgattttcgtcttcagctcttggcggcactctccgcagcccgttcggcgtctccgcaagcgtttgtttaccgcgctttcgtattcacaccttcatttattacgtccgtcatattatcccatcgtcttctcgtcctttgcttctccatcctttacgcttgggggatctgttctcttgttccctctcccgtaaatggccaaggtcgatgcagcggcggattctccgtccgccgcatcgccaaaccacagccttccccaaggccccgttgaggctcgctcgctatcctccattaccgctgtagcctcgaatcctccggcttatccgcggaatccgacgcagaagaaacttgatcctttggttttgtatattgtgagagtcccgggcagtaaaggtacgtcatggtcggttgcatatcgcttgaagtaccccgcataagcggtgggagaaattgaccgatcatttaatctattcaagtttggacgatggatgctaatttcaacgtctttgattcgcgatctagatgtctttctctccccgctgaaaccaccaacgaaagccagtgtttcggctgaggccatcaatgcgtccctctactatctgcatgtctcgacgcccgaggacgatgtcttgctccaggaatgtgagcaagagcgcgaggaagaagcgaaactgcggagggagctaggagaggaagcggatgttcctcctgagtttgcgaagatgaatcatgttcgacggaagcctgttcctggcggcggtggtggcgcaaaggtggatgctgatgcacgccctcccctccctgctcaccgatccaatgtgtcgctgccagagaatgttctcccggtgccgaattctgcagatctgccgctgtctctgatgccggctcgtccgggtttgatggggagtcgctcatcgatcgatctcccccagtctgcgactcagatgacaaccgaaagtcgcgatggcttcctcggacatacggtaccgggcgacgaggttgaagcaaggccgcctttgtcggctcgaccactaccacctgtcccaaaggatgagctcgcctttgaattgatcgaggataattctgcgccgaagaaggtcaatcgttggagtgccttgtcggggtatatgcccggacgaaatgcggagaattggaaggaaaagtatgaggttctgacctcaggccgtcacagccttgactccaggcgacctcaagcgcgaccccagtcggctcatgcgaatccatcatacaatcgcatgggttctccagcacgaagtccaggccaatctccaagtagaagaccttatgacagcaaaccgccggaaagacctggcttccatatcactctcatccgtcgcgatcctactcatgggagtcaatggaatgtagcaacaatatcgacaccgaaaatggacggtggcgctattgacatcgaagtgtccacgccaggatacaacaggttcgctgcgcaaagcgaaccgctctcattggccagtctgggaataaatctaccgtctgaaatgggcaatcgcatctcactgtcttctttccggcctacccaagccgaattggcagagagcacccccacccaaccatcgcatccccgaaagttccaccgcaaactatgtgtatctcgaccatatcaggaagacggccggggctccttagacctaggaggcaaccgaccctcactcgacaacggaacaagcagtccctcgaaacacagcggttccaaactcaaaagcggttactacaccttcacctcaccctggaacggcacctgcacattctccacgagcgtaaacggccgcagcctcaaatgcaagcacatgatcccaatgccctcaacaggccccaacggcgcctccatcgacaaccccgccgtaacagtcgccgaaatccgcttcaacacccctttccaagcaggccatctccaccatcaaccaggcccctcccacatctcccctttcaccctcagccaaaccccagccttcaaagacctaaccagcaaccctaacaaccacggccacggccacaacctcgacccaagcccctcctccccctcagaccggacttcaaagcgcgcctctctcgcccagttcctcaacccaaacaattacaaccgcccacgcgcccgctccggcgcatccgcccactccacatcctccacctccaacttcggagtgcccacccgcaaaccctcaacaagcagcacgagcagcggcgtcgcagacctcgacgacggaccccgtcgtcctctccgccgtccaccaagcgaagaccgcctcgatctctcgcttgcacgagaaaacgctggcggcggcatgcgcgggaagagcgctaaactgggtaaattgatcatcgaggatgagggtatcaagatgctggatttgctcgttgcatcttgtatggctgtttggtggaggggttattactattgattgagcttgtatctcttctttcaagagtatatgggttggtggatttatgggttgatttgatgtgcgtgtggatggttttgttttcctttttttatgtatgattgacgattgatgaaatgattatatatcctccgatttaccgagttgttgttatcagaaatagaatcatgtttttattaaaagaagagagggatacgaacgaaaaacaaatagatagagtactatctcgtatatactatactataatcaactgcttcatcaaatctatccattcgtcaatcaaaagatcaaactagcgctcaattgcaatgcagctgccgtcttcttcatgcacgctcacacagacccaagtcaaatagccagtagccagtaacataggtaaattcggggacatacgagaacgaaacgggagtgaaccagtcctctctttatcctttagtatgtaaataggaagaaaagcaaaatggataccactagaaaccaactgcatgggaggaaccaaaatgggggaacccgtgaatatatttattttattgtcatatgggcatccggaaacgcctgcgatttccagggaccaagatattcacttgagtcaaggatttcatactacccatgcccctttattgtacgtccattccacgctgcagcgacgattccagatcgttgtggacgccaccgcccgcggcgagcgcctcttgaggcttgggctcctcttgcttccaaacgccctgctggttctcggggatcgggacgttggtctgctgggcaatctgctgctgttgggcggcagcggcggcctgcgcctgagactgctgccggacggcggcacggaagcgcacgacttcctcgtagatcatacgacgcatctcctgtacgtcgtccaccacttcgaagtggaaatcgaaggttgtggggcacgtcggctcgtccgatgcgtcgtgccagatgtgcaggtatgggtgctccagggcctcttcaaccgagatacgcgacgaggggtcgaaggccagcatgcggtcgagcaagtcaagcgcatcagggttggcactggggaacaagcgctggaaggggatcttgggcatgaaaggcaagttgcgtacgtactcctgggcccgtggagagccgatccggctcaaggtctcctcgttcggagtgcccaggtagtgcagaatctggttgagctggtcgacatagtcacgacccttgaagaaggggcggccgccaagaagttcagccaagatgcaacccacggaccacacatcgactgttgaatatcagcaaagtagacggcaagagagcctgtcagcggccaagaaagacacatactagctttagtgtaactctggaagctcaacatgatttccggagcacggtaccatcttgtcgcgacatattcggtcatgtaacctgcgttctcttccgggtcaatcgagaaaccacgcgccaatccgaaatcgcaaatcttgagttcacaatcggcattgaccagcaagtttccgggtttcaaatctctatgcaatacattggccgagtggatatacttcagaccacacaaaatctgataaataaaagactggaagtgggcatcggtcaaaggttgtccggaacggataatagcggcgagatcacactccatcaactctgggcaaggaaatataagcagctgtacatgaaccatgttaaaagggtactcttaccctcatacagatatgtttcattgaagttatctgggcgcgggatgtccatgtcatacagacaagtgatctgcatgatacagtcagccctatcaactccactggcatcaagttgggaccaaacgtacattacggtggcctcggaaatgctgaagcaacttaatttctcttaaggcgcgcttggctaagatcttcttgctgaagacattggtgactttcttgatggcgacaccttcgccggtctggatgttcgtggcggcactagatagcgaaaccggaggttgtcgtcagattgtggtgaccacgacagcttctcataatattcatcttcgcaagactattaccctggatagaccaaggtcgacgaggagacgagtatgctagaagcttatgatgatccataacgtaccagacaataccatatgcaccttgacccaactccttcgtgacattgtatcgttcatccacaataaaatcctggttgaagaccttgaagatcttacgtcctcgtagatcagccatggtttcggaggggcgataaaaaaaaaaaaaaggtttccagcgatcgactgctagtagcacaaaggaaattcgaggcggtaaagcgagtgtcgttctgtagacgcccagaaagaaatggaaggggaggaaaatgtgcggtctgtccacccaaaaggtagtggggtttttcgcgagtacttttgttgttttctcaacttgttttctggttttttattttcctccttttccctttttattttctgtgtctcagtcgggggggaaaaaagacaggcagaagatcgggcgcgggctggctggtcgatgagagggaaagcagcttcgaatggacggaacggcagccccgcagtgggaaagtcaatcttccgccgttgcggctcctgaatgggaaataagggtttcaaaacttatgacaatgaggcgcagcaagatgggaatgagagagatctttctagaggcagcaggagagctgagagcaatgtcaggtttatgaacgactaagcgcgttgaaccactaccgggtgaaagaggggtataattaacgcagatgatcggttggggccttgcagatggaagaggttccgaacatgcagtacttagcagtcaaatgtcggcggagggagaacaaagtggggattattgaaagtacatactttggttcattcaagaaatgaaatcataaatgactttctctttcatagaactcgtttgctcattctgtcattaacctattgttccatcacacggcgtataagaacaaaccaaacttttatttattgatctattgcttaaatcatcgacaaagaggaagccacacatgactttgggtgtcctgtttcggtggtttgccgcccgggatgggctgcctgaggcccataaggggaggggcttggtggagcactaacgatgacagtgtcacacctggtcacactgtcacattctagtcccaacccaccgcttagggaaggagagaaaatcttgtaccaattagtgttcatcccaggttgaacgactggacactattaggacatgagccttgcaatgaataagggaactttcaactggctaacatgcatcccaataaatagcttttatcagaaggcggacataaaaagaggggaattaatgcctgaggttccagaccacctctataacttgaggcttctcttgctttcgaacatatatctggcgaaccctgtccgtctctgcaattgcttctttcaatcggaaggagaccttgtcctcgtccttgctacgcaatgggcccaaactatactcgaatggatcggggcccttgtatttactcttatcccacgtctgctccatggaatttggatcctgcaagggcaatgagtatttgacaacggaaaacccgtttatcagataccaatcatctgacaactcccaacgtcgcagcagacaggcctcaccgcagatggcagccaccttgctgagagcaaccatgtcggcgtggaaccaggatttccaatgatgcaatgagagcggcagtggacggcctgattcgtagaacccggacgcatcgccacgaaggtctaactgatggaggccaggctcccatttgagtttcgttgtggtgtggctgtagatacaccgcgcaatcattcgatcaccggcgcctttgaaatcatagcaattgcggaaaacagcattgagctgtcgaacaagaggaatggagaggaatatcccagcaccgccgtacgccatatgactcccatgatacatctgcatgatatcctcggtgagtgcccctatatactgcggctccgccggatcatacgtcgccaaccgttccacgagattcgtcatggaagggaaaaaagtatcatcgtcaattaagacaatccacttagtaagctcatccttgcgctcaaacagggtccggatcaaggaaaaataccgatccagcaaatcgtccgagttttggataacggtgaggcgaatatctagttcctttgcccgtttcttggactgcgtcaccgagccttcatcgtcaaccacagctacaatgtgtgcatttgttcctcccgcccagtgtgcaaaagcatcaagagaatcatataatctttctgtggatgttgcgacgccaaatatcaggtgtgatgcattggggcgtggagccgccacaggggcatgtattgtcaccgacgtagtacatctctcctctggcagtagctctgtatgattcgtcgtatccagttggactgtctggtacgtgggaattggtacatcgagcgcatctgagaaaccagtaaagttcttggttcgcacaacagatatctccaatctagcatattccgcggaggaattggacgcgtgcgttctcagcaggtcaagatccacatggcaagcgctgctgttactgaagtatgacgggggctgagcattgggaatagggctaatatcaatatgatgccgtgaattgaaaaggaatactgcgaaaatgagtaagagtgaagcggcgacagctgtcacggcagtggattggcgccattgaaaagggtaatagcgcgcctgcatggcgacccgaacatagctaatatctcattaatcgtcgttctatatgattggacaccaaagttgaatcatttattgaagggctatatttaagaaaaaggaaaggaaagaaagaaaaaaggaaagaaaaaatgcttcagttccagggtcgctaggggaaagaattggaaagtgaaaaaagaaaaggaaagaaaaggcagatgatgacctagacccttgtttcagtcaagggtaaagggctgggctggctgccgcccagggtcgcggctgagcaattccgaagatctcaatctgaatggttccagtggaccgccggtattaccaaatcaacccaactttcctgattgacctggtactacggagtagtgctatatattatgacttgtattagagattttgcgaaatcttaatggtaaacacttcgtgaggggatcttttacatatcaatcaggacatagcttttctggtgttcaatatattttgcacctacaaacacacaatacaataagaaaaacatttgtagacggagcggcagtctaccgtaatggtagatcggttattgcatgtggaaatattctccaaaaaaatgacttatcacatcaattcatctcccttatgaacatcattgcgtcattcaaccttttatcgttgttcctcaatacctctatgctttctagtgtcttgatgatgctatgcgacgcttaaatcatcacttccggaacaagcaacaaaagaaagcgcgagaaatggcctttaaacagccactctacagagagttgactagcctgcgctctttcctgagagcccgaagcttttcgcgtgcctcctcgagaggaatcatgacaccttgcttctgagttgcagggtcatcacggttacggatgttgacagtgcgagcctccttctcttgagcaccgacgactgtttcacttagttagtatattaaacagagtaggcatatgttcagccgggccgtaacataccgaaaatgaagttgtactgggccagctgtccagtacgaatcttcttctgcatggtatttccgctgatgtcaatgtcgacgttcagcttatcaccgcgcaagatagtctgcagctcttccacgtagtcgttcacagcaggcatgacaggaacaataaggatctggcgagggctgatccagaaaggccacttgccgccaaagtgctcagtcaagattcccagaaaccgctcaaagctaccgatgatagctctgtggatgacgactggacgagcacggccagggccaggctcgctagacttgttctcgccctcggccgactcggcagccgcttggctcttgtcggccttttcgttgctcatgtactcaagcttgaagttgatgggagcctggtaatcaagctggatggtggcacactggaactctcgcttgagagcgtcagcgatagtgatgtcgatcttaggtccgtagaaggcaccgtcaccctcatcaatggtccagtcatcgcccttgaacttagtcatggccgccttaagctgctcttcggcatagttccaagtttcaagttctccaaggtacttctctggacgagtggaaagcttcagcttgaaagtgaagccgaaaagcccatagatagattgaaggaaatcgaatagcccctcgatctccgaggtaatcttcaaaacgtcagtgagatgaagggaagaaaggagatcccgaaaagatttacctgatcctgagtacagaaaatatgggtatcatcttgctggaacttccggacacgggtgagtccacttagtgcaccagatgcctcattcctgtgtaaaacaccaaagtctgcaagacgcaacgggagttctctgtaacttctctcgcgatgaccgaaaaggacgaagtgtccggggcagttcataggcttaagagcccactctctcttctcaacatcaagcttaaacatgtcatccttgtagtgagcccagtgtccagaagtcttccagatgccaacatcgtacatgttaggcgtctgaacttcctggtagccacgcttacgatactctgaccgcaaaagggtctgaagagcattgaagatcttagtaccgttggggagcaagaatgggcatcccggggagacttcgtcaaagaagaagagctcctgttctttgccgatcttcacatggttacgcttttccgcttcctccaggaacttcaaatgttcttgcatttgcttcttgtcggggaaggcgacaccacggatacgctgcagagagtcattactttggtcgccaaggaagtaagcagaggagttctaaaaagcaattagcctggcgattttatagcatgactcctcaatcccctacctgcatgatcttgaaggtcttaatcttgccagtgttttgaatgtggggtcctctgcaaaggtcgaccaaggtaccgcatctataaacagtgctcttttctccggtcaccagtttatcaatataatgcagcttgtacttgctgtaggcgaacatcttcttcaggttctctttcgtaacttctaatctgtcaaagctctgcttctccttgaagacacggtttgcgtgcttgtccagtgctggccaatcggtctctcttacaacgcggctatgacagtgttagtaaccagtcgagtagatctgtttctttctgggacgcacttatcaggcatggccatatcatagaagaaaccctgtggagtgggaggtccatgggagagcagacacccatattcgcactcgcaagcctcacccaggcagtgagcactagagtgccagaagacttcccttccttcgggatcttcgaatcgcacataggaaacagtacagtcgccttccaaaggtcggctcaagtcccagagttcgttatcgacctttgcaagcacaatagtggcactcagttccttgggcacattcttgagaagttgggcgggggtagtttcccaggctttggcggagacctgttccttgttgccgttgccgggttgcagggtgacggtaatttcggggtgaggcttgttcttggtctcctcgagatattgttgccaaagctcctcgaagaagttgttgcgctcaacgatgaaatcgggtaacgagccggcacctgatacaattgactgattaggaggggcattcgcaatatttggcggggttgataattaatcaccttgagcgccaggagcagacctgacgggcagatccttcgaatcctcagaagccatgactgtatcccgcaacgacaaaggaacgatcaagggggggaaagtacagggaaggaggggcaggccagcgacgatgactcttttgcaacatatcgggaatatatctttaatccaaccagcagtgagggacggaaggcggtgaggcacgtgactgagaactgccctggaggctagcgacactttaccgtttcgagcttcccaccatttgaaaacttctccgggttccgtccgttctaacaggtcaatctcaacaaccaaatcaatatgtcttttcgaggaggaggtcgcggtggctttgccactggtgctaatcgcggaggttccttcggtggccgcggtggtgagtgaatttaattctcggagttggtggtagaaatgagcgaggactaacgaaaatttcgtcggacaggccgcggaggcttccagcagccaatgggaccaccagcacaagttctgggtatagaataccgatgcgattctcagaccatgggcagtttactgatattccttagagatgggatcttttatgcatgcttgtgagggcgagatggtttgcgaatcgatcaacccgaagattccgtatttcaatgctcctatctacctagagaacaaagtacgagttaccgaagatgtacgcttgggaatgaaatgagaactaatacgttgcctttagactcctatcggaaaagtcgacgaggttcttggccccatcaaccaggtctacttcaccatcaagccccaggaaggaattgtcgcaacttctttcaagcctggtgacaaggtctacatcggtggggataagctcctgcctttggagaagtatgggtcactcctctatgtgtactttgcgaacagtattgacccgatgatcataggttccttcctaagcctaagccgccaccgggtaggaccccatctacggcccaacatatgttgcgcatattactgacaactgtacaggtactgctaagcccaagagagccggaggcgctgccaggggtggtgctcgcggtggcagaggaggccctcgtggtggagcaagaggtggacgcggcggatttggcgctcctagaggaggaggcggcttccgtggtggagctagaggaggcggtggaggcttccgtggtggaagcggtggcttctccaggggaggcggcagaggaggacctcgtggaggtttccgacgttagacagtctccgtcttgcttagcactgtcttattacggcgttatgggaaaacgggagcttttgcaggaactttttgtgttaatttttctgtgcatcctaggtggcttgcgtattcgcaaaggctgtagactaattcagccattaaatgaatgttattataccaatgaagtacctgccaaatgactttccagcttattcgtagatccttactcgggtttttgtacgatcgcctttttagatgtggctggtgtctgtggcgcagcacgacaccgcctggccatgacgtctggggacacatgccgagccgtagaatctgtgcggcgtgtcaacaccctttcaactgcaaccgctaacaaatccctcaccttttcgcaactttcccaccgctgtcgacataattcaaagtctcacaactcatattgcacctattttgcgcgttccacctatcgttagaattcgaattgagcatgtctcgtaggtcatcagtcatgccgtcgaatgcttctacgaatagcggtctcccgcccgccggcgacggaggtaagctttgatcattgctaaaccgatcaaggacatggaaactcagatgtatcaggccaggaaaagcagaagatgcttctgtctgcggaaacagggcacttcagcatggtcaggtaagcctttacctcggcgacatcttgtaataaatctatccgctgactgaacattcttacgtcagggctttgcatcttgcagatctagtaactgagcttaacggtaatatatctgattttatcatgctgtatgcttgccaagatttgctaataatgcttcataggattttgtggaggcaagcctacttcctgatatttgcgattagacgccagcctttactgacttttacgaacagtcatgtctgtgctctcgtctatgcgttactgtctaggagacccccatgactacggtgctatctggtctgcgcttggatttatgcctttcgggcttttcttcgattttatggatggaaagattgcaaggtggaggaagaagtcatcgctcatggggcaagagctcgattctttggcagatctggtatgctgatctggtatgtcgatatgacgaaatacttacggtcgcttttagatttcctttggtatggcaccggccgcggcagccttcgccctcggagtccgcacaaatgtcgaccacctcctcctagcttttttcgtcctttgtggcctgacacggttagcccggttcaacgtgacagttgctgtacttcccaaggacaagactggaaagtcgaaatatttcgagggcacaccgattccgacaacactttccattgcgtcactcatggcttactgggtttctcagggatgggttcaagaagacctaccgctgggagttattgcgcagggcacagcttttgagtttcaccctgtggcgctgttgtttgttctacatggctgtctgatggtcagcaagtctatacatattcccaaaccctgaacactaaaagctgtgcaccgacaagtgaaaagacgttcctgtattggaatctttacttcatagaaaagtgttgatgagactttaacatatatatgtaactaagctagaacgagagcggtcacaaagcatttcctaaagataatgctctttgacgaaaaaatttggattgcgaaaacctgcatagtcttaactctagcctagccatctgtttgctaggctgatttgcgtatctccagtctaacatccaccgcttagtcaagtaggcataatatttactgaacgctgcgagctgaacacagcataatgtatgcaataaatgggccggttcacgtataatagagagtatggaaattttcctatattcaagtaacatatcttttcgatacaggcttaccctcaaaccttctacaagacttccattcttgcgcttcgagaaaagccactgtacgcgcgttcaaacaatatgtagttccagatataccctcgctgtatgcagggagctcgacatacgttgaccttgagtcagaacacaataccggatccgctacagtattaccactatgcacccaaaatagtagcgattgcaatagtactgtagacctgaatcaccgagtctatctatgaaaatagttctcgataactattgacgaatatgacgcatgcacgcgaggacatcaaacaatcccaacgaagccggtgcttaaaaatacatagcacctcacactcgtgctgataagtaaagatgaactggacaaatacaagtggatcaaccatcgatagttattcctgcgtccccatgtatcttcgtgtgcgtgtccacttcccaagggaagtccatgtcacatgcacgtggaaggatggaaaattttcttatatgaggaatttcgttgccagttgccggtgagtttatccacaaagaccctcaattgccactcacttttttttctgggagataaaatacagggcaacgaacaataccaaaaagtcgcccaggtgaggctagtcgtacatagtgtgacctgtgatggataattatggaaatgttgacaggcgcccgtggggcactgacacattctagacctctcgaggcgtttgtttcacgttgaccgaaaatttcccttgtagccaagaaaggaaggagggtttgtccagtttattcttagtatttgcgagttcggttgaaggttcgatggtaccttacaggagaggcgttcatgttattctattattggtgaggtttcttctccttgattgctgtttgtgttggttctcggttgtactgtgtatcttggttatgttaatgagttgattattattgatttattcctttcgaggaaaggcaactcgggggtagggcagtggttggttcatgcagtgcgcttacggtgttagtatatccttcgccactctttggaaaatagttggaccgatttccagttggatacttgaagatgacaattgtacatactttttgcctcgtccatggtaatgtggagcatagcaacagcattcgtcaccggttcctgcgatgttagcgccttgcgctgcagtcatgggttgctgcgtagaattttgaactgcgtatgccatcttctccatgcgttggtgatatgaaacaaaagaataagcttaaattccatttcacaagcatcgcctcctgcctaagctacccgaatgtaagcaggaacaccgcctacgtgtcgcgtgctgatatggtgttgttaaacgcatgcagagcattcgtcagaatgtccgtcggggggcaacatgaaatacccgatcgttctgaaagagatactctatatgttgacgagtacgataatagtcgaccggaagtctcgagtacgctatgctctgctaagcgctgtgccctgtcaagctttttctcgctttccgtcaaatcatagactatagttggtaggcgattgtgtttgtgtctgctaaacgccctctgcggtttattcacgagtcacaatgctgcagcttgcagcttttcctcgtcgatctgttgatctcactgtatttgggtcacatctgtcatttgacgtgtacattcttcaaactgggtcattcttctgtgccatcaccgccctatatatttattcaactttgtattgtgcatggactcttttatgcggaaatttggtacagcgaaccttaccgacattttctttatgggtttcggaggatccgcatcaacacccagggtcaggattccaggtccactccgggagtgtccgcttgaacccaaggaacggttccgtgtctctccttttgtttcacccgaataatgaacaattttctcatgacggtgaggacttacttggtgggcgcgcaaatacatgcagccctaaactaatacccaggcaattatttttgtggcgccttactttcagaagtacctattacggctgacgaagagcaccataggacatgtaagagtctgtacggagtacggagtacttacactgttagtgacaagatctgcatgggtctgcatatgacgcagccctttattggtgctgaccaaacacggctccaaggctccataaacgacggacagttcccttgtaattggctcgtggccgcacatcaggatcaaaaaagcctagtcgactttgaattaaaaatggtacctgaagacgggcaaatttggcggttatttgtctcgcttgccacgcctcgggcgtagtatctcgtggagtaagctgttatgggctgccaatttttggaccctttagtctgtactccataccagagaagaagatcagaagcgcacggccttgccttcgaacattggtgcagaacagccagccagccatctattgttttcccgcgctttcttcccttggggaaaaggtccgggtgttccgttcgctgcttatggggatattatccccgctagcgaaggtatggagcaaggagctgtgcactgacgcggcaaaccttctagtgaaggaaaacggttcacattgccattgatcaacactctgtattcaccttgcgagcgtattgtattctccagagtatagagggcatcggcggatggacatccaaggcaacgtagtaaaatcactcagcctagggttgtttatgttggtacaccgcagtcgcaagcgaatatacggagtaagattgattcatccccactgaaacaaaaaaacggacaggaagttgggcgtaaccatggatgggcaactgagcttcctaaccgtctattcgctcatatgaggtaaaaattgccaaaggccatactggccataacttttgtcaatcgatattctgttgggtactgtgctatttccaactcttaagaacttgtccacactggatgatcatggatcttttgtttcattgtcatttgatccatagaagaagaaaagaacctatggggtaaccatgactgtccatcatcccctcttttcattaatgtagcgccgccactaatatcacaccaaacctacgaccttccctattcaggtatagtgtatgatgatactccatttttctagcccgctcatggatactgaaatggaaagggatcgttgtgcccctggatttctgattagccaatccattcaggacaccgcttatctaattcgatgtcacgctctgattgaagcagcgaaactttggtacgcgggacaaaaattaccgccctgcatatccagggtcaccctccgtttggaaacgacccccaaaacgcaacggtacgtaccacccatggatatatcccgttccatttatttggaagctgctgctgataatgtgtaggtcatgatgattcgatttcaatggaccttttatagctgttagtacacaccgtaagaacctaacctgaacttagaagccaagtcattggtaggactcgtagtaagtagtgaatactgtgtgtattggattgtaggtgcgtcgctttattgcccggtaaattgagcaggtatcaatcaatacggaggagttcttccgtttctccctgtagccctccccccagtcaagtcatttgttcaatctcagcagacccctacctaccaccgaccctagtatccttcctttcccttccccttccttttccttccgttccttcctgctttcggacaaaagacactcgttttctcttcttgttcttcactcggaggggtttgtctcctgttgctttctttaagatcaattctctttctattttccatcgtttccccccttgtttttgtttaagtcaaacatattgacgattacatcaatatattcccccctcgaaattctccgagtcagccttcgttcgcgtccgtaccagttcgctgttgctgcgtgtgatctgaccgaccttctaaatttcctgttaaggacgttcattaaactcctctcggcagaaaggggcgcttgaaacgtccggtcttcagagtcttccccgcctaagaaccacccttgacaaacccaacattctttcccatcgtcatcgcattaacctgacttcatcaactatccttccactcgtcaccggcccttgatcagctgtgcctttgatcgactgtgtcacgtttaataagtcgtattgtttacgcgaacctgacccctcaaggtcatcgcggccattttgacgcctttcgggaagtcgactgcgatacagaatctcaaacaacctctgtgatctaaaagggctacgccggtcgtccctctttccttcgcttaactactagcataacaaccatactgtctggagcaggtgtccagacactgataccccttgcaattgatatccgacacatctacatctacaacatgaaatcattcacgatgaagtcggctcttgcagcctccgcccttctgattgcagcctacttgccagcagtgaacgcacagacacaagtcgacaagggatgctatagcgattcgacaccgttgaaggatcagggctcttatacgtaccaaagtaacggatactgccagaagctctgcttgaaggataactatgctgtttttgccttggcaaagggcacaaactgtctttgcggtaaccaattaccggccacgtcggctaagacggatgatagcaactgcaatgtcaagtgcgctggatggcctgatgtgatgtgtatgtagctttcccacgcagcccctgctcttgagtgctgatgtttcattttacaggcggtggtaacaatgcgttttccgtgtatctcacgggtatcgaagatgatgtggatagctactcatcctcatcctcatcctcctcgagctcctcctctagcaccgagagtggaacctcgacaaccaccaatggagggactgtcgttactacttctggtggacaaacagtgttcaagacgtcggaaagcgaaatgacaacacaggaagccgacgcaaagaaggagaaaaattctggatcgaatactgctgctattgccgctggcgttgtcgttggagttgttggtttctgtgctttggtgggagctatcttctttctatggcggtttaggaagcgttccaacatgcccgagcagtatcgcaacaacaatatcgacagctttggcgccaagcccatgtctcaaagctccatgtctgattccaggtttgacggtgacttcatggcccagcggcgccagagcaatggcagcatcgatgatgatcaagacttctcccgtcgaattctgcaggtaaatacgatgtgcccttattcgcgtgcggccatgcagtacaatttgctaaccatgatctaggtgaccaatcccgatcgccgttactaaactcaacattgaacctcccaaatggaccaagcccctagtgaattatcgaaaacagcctgggccactagtccgactcgttatcctgatatacataaattagtttgcgatttaacgcctgactgccatacattccttcgatttcatttctgatttcccctctaccgcgcttcatttggcgaccctgcgatatcttggaggcatacctgtagataagttatgacgtttcactgtctaccgttgtttgcaacatgttgttcgagtctggaactgcaacgcatccctacttccataatccagcaacgccccgtgacgtgttcggggagtcaaggacgatatcatcatcgcggcctgcagagaatgctgtgtctgcttggaaggaatcggcccggacttggccttacgaatgtgtggacagtcacgagatacccaggagggtccgaagtttagttctgggtttagactgcggtacgtcgaccagagaacttgtattttgaaaaggcgttctgcggtgaagtgttcttgaattttccttatgaacatatctgcgttcctccatacctttctgttcttgcgctggggataatcggccctggtttactttcttttgctcggatgttttctatttatttgcgatttactgaacttcccttggccatcatctccctaatgttgttggtatgcttggggaactgtaagtaagatgatggctgagcctgtagttaatgcgaagaatgaatggataccactcttgtttgatctcgacttacctggccatctgaacttaggctaatagaccgttcactaaacattgcccacggaattgtttccctactatcataatctttgaagagacgtgaccaactttctctctatctctctacagtctatgaatctctcctacgactgtccacttacattcaacctcggtcactattcacaaattgcccaagaggaacttgtcagcggcattgtgttcatcaatcttgggtacttcaccctcacctccctacattcaagatccaggaagaacgcccaacaccccacatcagacgactgactgtcggaatgtcgaatcctgtgaagctcccctctacaacacaccgaccactacccactagtcagcaattaaccaccatccccatgtaacatgtatcataccgacgtcaaccctggtccacatgtgcgacgaaagcgcatctcacttggatgattaatagcctattggaatttgtatctcactatagcaacccacgcactgtgctaccttgaatcatttgttcctaaaatcccttgtataagctttccagcatagaggatctcattcctactgctctttctcatcctgtcaattcgatcaccattctttctctcgtttagccttggtatataatctggtgtatactacggagatatatatgtgtgtatccgcatgttgacacctagactacgtccgatatctcttgttaaatatatcctcttgccctcgttaagagctccgatagccattacttgcttcgataaaatatggaatcccatagtagcaaaactcgcacacgaaaccgcttcactctcagtgtaggcaaaccggccgtctacatagaccatgccggtaggcctttcgatcaaagaaaccgtcatccgttcccagctctcatttattcaaaaccactagatcgttctttgagatagattgcatgcaaatcactagacctgtttttctgaagtcttcatttttctgcaaatgattacggtagtagtagttcctattaccccggcatagctagacacaatacaagtaacccggtgtacaggtgtagtataagctcccgatgaagttattcatttacatacaacgcataagatatcaacgaaactacggtggtgaggtttctctcccacccacgaccatctgcctcaccattcccgacgctggatggtcttttaccataaagcgaagctccctcgtctcatctatttccttttatggtaatgctatattagaggtgatgtccccagattcagtatgggattacatcggataagtcattgaagaccgtagatcgacccctttgaccataggaagttcaaattgatggtgtttatctagccttgagtagatactacatgtatgagagttatttgtatgtttaactagcgttggtttcgtggatatttgcgaacatggcgggttgggtgattaattctattactgactctttgtttgattgagatttttgagatcttttgtatgaacttttatttcttgttgatattattttgggttcttggttcattgtcttgttgggtctagtttctaatctatagatcctcgttctgttgggttagatgtgtgaaggcgggagcatgttttacgtatccatgggtgtaaatatatatatacatatattcccgttcgcaaacaccatatgtgcaagtatcttcaatttggaggattgttttgaagtttctcatgaagctctaaaaccgtttgtataacctgtcttgataagggcatcgtcttcttactgacagatcctagaaagacattttgttcaatcttgttagcctgttcgctcggattctttgcagtgcatacttcgccgcatttctgataactcagtttttctcgatagatcatcagacaatcaccaaacaagctaaacgaggaaaacacggtatgtcagcccgacaaaccaaaaccagaactagcccacgagtcctatcgacaaacatcggacaatcacccaacctcaaaatcgaggcaatgaccgggtgtccggatgaagattacgataaatatagaatactgcatatctacgaaccatgcaggctaagaaagtaagacgcaagtagtagaaaggctatgtcacgcctacgataagtagtttgctgcaagagtatgacgaaaaagaaaaatagaatgaagatgctgacatgacggaactgaatgcatttctgcacggtgatgccccacgtccaaacatgaagcaatgcagaaaggctcgtttcaagattgcatgttgataaatatagatacagcccctcacctgaaaccaacaggttggggaacggacgcagcttacatgcataagggtacctgtttcaaaagcacaaaccgccagtcagcacgcagactgcatggtgagatcttaaaaagttggtggttgagccagcaactggacggggattaaacgaggggaaaatggccctaaggcatcctgggctaaaaataccgagatgtcagaatgcgcctagcccttggccacgaggcacaacgtggcaaggatcattaaggaacccgcatggttggttcgtgaggagaatctcacggcgaaccgaatccagtaagtggaagggtctatcagtgccaggattatggaatgactttgggttgttgttggctgttgcggactccgcggggattgccttttggaactttctgaaacttagccgggcatgtactggacagcactatacatatgtagtatgtacaaggatgttgcacatggccttatagccatactatgtgacgtcagtggcatatatgcgcccggggattgtccagagtgtcagacaccggaagtcgctataccacccgccattatgtgaggttgcatttcccatattcgacatagctgtgtcctgtatatcaaggtggcgtttgatttcgcacgtgttgagtagtggatatgaagatcatcctaactatggatgcaacaccctgcacgtttggccaaggcaatagtatatggaccccgccgaagggcaacatattatccggcaacagcagccaatatcagagtcccattggttttggtaatttaagcaggatgccacagagacaaattccagccatccacggagggtcttctggataatggcaagagttacttgtgcttgacagcgaatgatagaaatgttgttatgcatagtatgggccaatcccatgatggccagggtgttggttgagctgagtgatcgaagcttgtgttggggtctacccgtgccaaacctcaggctggaagatgtttactaatggaatttgcagggcgcttatctgttttcggatgtatgttgcgatttagcggtcttatgtcctcaggctgcataataccgctgcctgtattttgtacggcgtagtactcgggatttggtagcctgtcatagtcccctcaaacgatctctctccgatcgatcggctccaggtactttgtacttttgagttacgggttgagggtggatgcaatatccgatatatccagtgactcagggaaagatagacaggagagtcaataaaaaattttttttgagaaattgagaaattctcactagaatggcccagtcccgaccaaatggtgtatgatcgtcatggaatggtaacagaggctcttgcacacgtgtggtcggatggaacattccaatggacctggtatccgcaaggatcaggttctgtcagatgtacaataacggtggcagacgaatgagactggcggtcgtaaattaatcaagacttatcagccaataaatttagtaaacggcgtctcgcccaagccaatgtgggaggtccgcatgcatggactaactgcacgttccagcggggatctgaatccttccagcgttatctgtcgttgtttttcttgattctctcaagtgggaccagctgaagaaattaattgtcatttatttgatcacactagcatcagaaaagttggtgatgtagcaaatgtctcttcatctaatagggagcccccggggttcggtttagatgaacgtggcggaccgtcccctatcaggatcgatattacttactaggtagtattatgatcaaccgagggagccaaccacctggcgaagagggtggatagttatgcactaacgacccggtcgatgtcaaggtgacaaacatgcctgcgatagccagtgtcggacccggtcctgatcctcgatgatggtactagtcagtcagatcatgccacacgtcaaggaaggccacgttttgtcccctcctttaccccctagctcaccgcatggcaccctggtctaaggctgactgaatagtccccgtgctgcagctacgcgaatagtgtgcagtccatcgaggcatcccaggcgttgcataaggcatacataagctgaaaaatcagatcttagtattctcttttcagcactaatttgctatcgtcggtcagcacctctcccaaaagagtatcaatgtgcatccaaatactgcaggctaattccggacttcaccgtaatcaacgaagtggtaactccatacggtatacatgtcggagtagcagcagaggcgtactcagtacggcccagtccctcagtgtttaaaattaaatctgccccgccggccagatcgaccagttccgtgtgcaagttcggccgatcatttgccccagtaggattctctgggcgttgaagcgaggaacatgttgtcgggcgctacgagattaacggaagttgcctatcacacggaattagggtaggccggagcaaagcgagggcaaacgcataacgagcgttctggaccaatgattttacgagagtctcgctaacgtgctccacgagggtgtctatagagcctcaatacaatacgtacaatagtaacaatactcgaaatagttcgatcgaccgcaaagacggatggttttgggatgtttcatgtagccagaggcttgacgatgtttacactacatagttgcacattttatgaattggtgcagctatgaagcatcgtcgatcccattccgcaggcaaaggtgtcgcccagattgatacctggaaggctgaagcagcctcgggatcatcaccggttggccgataattctaccatcctggcctcggcaatactcgtcagtaatctttccggtgcattccccctaatttcccgctcgttttagtatatgatccttgtcctacattagaaaacctggaaattgatatagcctctgaagtgtacaatcatacgcacgattctgacaaagtcagtagattcgctttcccaccagagggatcgtcaaaacaatttactagaacaggcaattcgtgacactacctattctagctagtgagggaggagacgtcactggacatcaagagtgagtgggaccaatctaggttgaagcgagccatggaaaagcgaaagaagatcatatagcaagaggagctagttcaagagcacggtaggagccgcccgtagttattccgttggagtcttggacactccgtccgaaccacggaatttctcaagacgggttaggaaaaaggactaaaaagcgacggactaaatctgacgctggcactttgttatccggcaagccagtccgggagtggacgtctatgcccgatcaggatatacatagacaagggccccactcgacagaagaagcacccactgagtgaggttgaatgagtttttttattttttttattatttttatttttaatttttctttttgctttttcaaacggaaggctttttttaattattcaaacccgtagcggagtcggtagggtatcatttccctcataacttgaaaccagtggagatcgtcacctctacaggtatatgcagatacctcttaattggtacggacttgagaggaacgtatcccgcggtcgactatcgtgtaaaagtaccacttcaccagattttttggtgtaaagctttgtccaagtagccgacgaactaggtaattgcgttcaagaacataactcgatttcttctcgccagtctccatacatggggtgataccgaccgtgatatgaggctctggtcaatagtcactttgagctttttttctctgagacccgcttcgcgccattatcctcacttggactggctcctttttcttttcttttccttcctcctctcgggggctctcacccatcacgatttccctgataagagccgatgattacccagcgacgatcactgactaactttttacataatccttcacagcctcaggcaaggcagactgaccgactgactgactgacgggagctgtccaacgatgtgagcattaatctcttcatgcatcgatttctatttttacactatcttgaaccttatctactctaaatcctgagctgagcactgcacagtgatcacagtactaagcagtagcaacttgtactggtatcaactgttattggatcaggcaggaactcagctgtttctttctgttagacagggatgaccgaactgagtggaccgcgtcatggtaacccaaaagagtatgcaatttgaagtcaaggccatcggatcggagatagggtcaaggtccccatgacgttgatcaagaaaggcaatgacgagaacatcaaggaattatcaccgaaccgaaatcatctgtcaatgaaaagccaataattagcgcatatggtcgagaactgtcggatccgatccggagacgtcctccatatctccggaactattggtttataatcaagactaagtgtcgcgttactgttcatcctaccctcgggcctacgcagtaaaccttcccaggaagaacctggagctatcgacttgaaatttgagggttggaacgcacggccgacccggggcacattctggctccggcggtggatcctgccaccacggactccagttccctgccgtgattccgaactaaagggttaagtacggactacccttgatgatttggaagttatgtttgcttgtatgtggtctgtataggcctgggatcgagggtacagctcagcagacgttagtagacttgaaacgatttaaagtgatatagataagaatctccataagtgctccggacatattccactgcatacatttctcacagccaaagcggatgagtgcatcccgttcggtttagcattcaggggtttgtccaatcaccggccccggcgggtgttggcttgactagtctagtacaggttagtgcctcatgtcggttccatcaatttggtggagatcatcagcacatgactttcaagatgcataagtaccgcctgttagtcagttattaccaagttgacgggctgttattgctttgtacaagcatcatgggaatcgtatacatactgtttcgcgaatccgtgatgtggccgaggagcaacatccgtgtatgaggatggtcgtttcgaatcccaaccttgttgtggatgacattccaaaaccgcagagttttcttactgcagtagcgtgatgttactccccttacgcggaaggatcatcaacgctgccatgggcctcttccacgtgattgttctcgaaccaatgcaggctgcatgatgtccccatggcatcctcagggctgggtactagtgcagcgatactgggggctattgggggcagatgatgccaatactaacagctaacacattagtgcctacgactgtgcagagtagtgtgcttaagaccgtaccttccaggagtccccccattggacgcaatcgccaagcattccctggatgggttaggttcaagcataccgacaggtccgacacgctttggtagacacctcaggtgttttatgcctctgagttctgcgcattgtctaggctcgggccccagaaaaaatactacgcaaatacgatggacaatctcaactgataccatattagattaattcatcaacgactgggaatctcgagccaggagaacgaaatgcaccaggttgtaagaatttagctgtttgtcaccattattcggggtctagaagactcgtggaagagccatagaagcccgcttactctggaagttaatacgcatgcatgactctgcgtcgcgcaggatcctgatataattccaccaaccttggctccccgaagctgcatcttctgtgcaggagattctctcgtctacagcatatcactttagaagctgatagaaaccgtgcgtaaaacagtaaaaacattgaatttggaataaaaaaggtagttgacctacggaccatggttgacaacccacgccatacccgctcgcctggagcttgagattccccagaattactccgtaccttctttgtccccccgacacctccctagtcttccccaccttgcgccatgtttactttgccgttcaattccgattttgtcatgcggctaacctgaaggggaccttcatttgaacggcgtatattaaaagggaaacctatttatacgatctgcccccccttggttccccgagattactgtgccaggcaatgatcaactggatcgatgaaacaagctagagcgcacgttgttgggacggactaggggacaacttagacgggcatccggcgtagataatagatatggccgatgctgacccacagggctgggtcacaccaaaatttctttgttgcattgtgctcgagtttgaattctgggtctccttccgtgattttcagtgctccggaacatgaccccgctggatctgggtaccttaggaaacaatgactctccaggcggaatagccgataaattgaccggcaagtccgatattcaggttacttcctgtggagtgattggccggtaagagtaaggtgcttattggaaatttgggactgggattatcgggctcttcccgatgctgctaatttctctcgacaatgttggcgcacgtggttttacctgggatatgcttccattccaacgggaggtatgaaagtcgtgtaagcagacgccaatcaacaatcgtggatcatttgcgtgaaattcggaaaatgtggattctttgcaaggagacagacgggttggataagaaaatgcaaccatcttggcaggcagactcccaagcatggggaagaagccttggaaccgaccacacgatcgacgagagctttcaagctgtgggaagggcaaggggaaccgcccaccatgcatttacgacaagcgtgctagaccccaccgggtaattggctagcagtgatgggaaatgtgacaatcaatccacgcgcacatacacatgatatgaatctgccctactaacaaaagaaaatttaaggagccgacaccaagatcgatcgttggtgctatgacactggccaggcgacgggagtggagacctaagcattagacggacgcacctgtcggaccgcgtgaattacttccgactaaggagactaaggctcaaaggagagaatgaacacttttttggctatcttggagttttcttgaccccctgggcaagtggggcacacaccgttggaggggctttgccttttggcacgctctggcgagggtaaaccatgacaaattccattcgtccaaaagtctatcagcattccaatgggcaatgcttacccatatacaccatgctgatttatccgagggggatgtacagtagttattaatagcttttaggttaattatttcaatttgttatgattattcttttctttggcggtgctccggcgattgttcaaacaattaacccgatttcttctttttcctttttcggcgattctgcaggttgggtcgcgactcgcgatatatgactctttctcaaggccacctcgggggccttagctgttcggtgtcaaaattcaatttgaccgatgagtgggtttccacattacagactacggaagtggttctggatcttggctggttgtggtggatcggtgatgtttaggaggtcaagagtggaccccattgaggctttaaacctgagattccacttgtagtttgcaagtcgtagtaattaccttatggcacggtggatggtgtgggaaaaagcaaaaagagaaactaaaagaaaaaggaaataaaaaataaaataaaaaaaagggtagaaagagaggagccgaacgaagatacgagggagccaatcatgacggattcctcgtaccaacacttcccactaatgcccccatacatgcagctgaatcccaacttctactgtgattgatcattattattatccttaacaaccataccgttgttatactctaccaactcctatgctacatatcgatagccttagaatacttgtgattagatattggtctggtagttgttccgaagtttccaagcacattgtaccgtactattagtgctccggctactacgacgactagtcatagtagtgattaatacctcgtagtgttagggttgttgaaaatgctcgatgtgacccgagaatggtccacgttgagtctggccttcatcttctccttactactccttttctttctaacccaaatagattggattaaattgaattacaggtcaatatttccggatcatcgtggcgctggggaatgaagatccagcaaccatggctctgccggtgctctggcgatgcagtggaatcacaccaacagaaagccgttgaagtgtatttgggcctgatccctgtcgtgccaacccttagtcgacccagtcgtaccgttcgaattgactactaacgaatggggcaagggtgtaataaaaataatctcgttgtcaggcatactttcccccaactttgcgcctcagccgcaccagtcaatacgggtcttgtctgttggtttcccggtgggtaatacaccacccatgcttgtttcccttcaatcaaatccctggtttctcacgccgcatggcaactgtataggtatagaattgaaaaggaaaaaaaaaaaaaaaaagaactaaactaaactaaaataaaataatccaattcagtaaatgcagaaaataataatttcctgttccaggattatatttttatccatatgattttgattcatttgaattttatatcattttaattttttcttttctttttttccgttattttattttcttttttactctcttaattccatgttagctccgtaaagtggatgcatgtcttcttgaggcttttcatttacatagccatcatgctctctgggttatttaatttcttttgccctttggtatgatcatcctgcagactgatcagcactgttcgcttaccctatctatttgtgattgttgctatgtttaatgacaatcctattattctctcgaaagaacaccccccggtttaaattaattcattcgtcttatgaaaaaagactaataataataattgatattcggttatcattattattattatttatttatttatttatttcattactgtcatcgcccgtgcaagggtctgcagcagatctttggcgaaaccatctgactcggtacctcgcatattccactctgacggttctatatcagttcctcagcatcctcagcactctactaccatcattccgactgtttcagattgtctctcttcatatccactggatcttactgcatcaatttgacttgcatatgcgaggcattttttgtttatttttttcgtaccgtctgatctcatctatttccgccctataaaattatttctatactagacaatatacgaacttgcatcacagcccaccgtccccacacgcccccataccacaccgtcttctgttctgacaggcacctgagtcgttgcatcatggctagaggatctgccccaggaaccgaaactatatctactccccactcgcctatccatctgtcaacagtcctcaactctccacccaactcttcaagaacaatgccttctactgcttccacttctcgaacacagaacaacaaggcttcgtctaggaagactaccaacacgatgcgtcggaccaacactcaaacggagatccctctcccaatcacctataccccaaccacccatcgcatcagtaaagcaaagaagggtaaacgggtacacgcctgcgagtacccaggatgcaacaaggttcgtcgactcctacaactaaatgattcagtcccattaaccccccattcagatcttcaccagagcagaacatagacggcgacatgaactcaaccacaaccctgaggcagtgttccgttgcacccatccaggatgcaaaaaggcctttcaccgtcctgacttactgtcgcgccatgtagaaagacagtaagttggacttgatctgaagtatcggttgagcaccagctaatgaacgatgttccagtgagattgagactcagatgaacaacgcacaatggagccgacagagtcacatctccatggtatctgaatctcattacttgcccaaggccgcacctgttgatcccaatgcgggccactacctggctgcaactcaaccaacgacttctatgtcaattggatccctcgtggcaccacctatccatccagacctagcaaacgacactggttacatgtggatggggatgaacatgccgtcagagcaccaaaatcccctctatcccccacaccacattcatgaatccatcgaggacagccaattctactcgagcccagaggcttgcccttctccttgttcagacggtgcaacattatctattccatctcaccctcggtcatctgtcgcttcgacgccaacagcggttgccgatcaatatccggaacccatcatcgatagcgatttaacatcctcaccaatgtctatgcatgctaccttgcggtgctgggaccaatcagaaggaccattggctacgccaagctatgcacctgtccctttgagtgatgtaagcctaccccagtctacagccaacaatagaaagctgactagtgagcagccttttcactgccaatatccatcaccaacctggccagccgcacaccacttcaactatgacgagcccgcgcttccatctgggacacagttccctcccccagtgtcctggaagtcattcacgatttgaggccaatgcagaacttacgatgaccataaactaatcgcacacgctactattgagacacgctgacgcagccgcccgatcttgatttctgatgtacgattttacttgagcacgatgccactcgttgctgagcacattataccatcgacaagcgagaggcattctggaggaaactcgctcgatgaaagggaacccccggaacggatttaacgtcatttctcctgctgtaccacaagaaaaaaaaaaaaaaaaaactacagcctagatcccgagaaacgatcaaggctacacaagccgttatcatctcaagacggacttccactggttgaaatcaagaaggaccccacgagatctattcccggtattctaaaaatgatccgaggacctgactcggaaggtttcgatttcgtccgcaacctgctgtattacagaacctctaccacgatttctcttctccatcttcttctcctgcgccatccctgatggtcttcatagggcggcgcatctttggaaaataaacggggctccagggtcttcttgggatttgggggtgttttttcttttcctttgtaacggccggaatttcctttgttcttttcttatgtcctggaaatctccttattttatgaattgatgtatttctatacccccaggctgattggtatatattgctatcttgcctttttgcttcaaccagatataactagacttttggttctttttgaaatctatatattctgctatgctatactatactacatcatgattacgatctaagtatactgcaaccttcaaatagtgtaactgatgtaatatctcacctccactactatagtagtatacacagtgtaacagtaacacccagatacgagaacatccaacccaataatcattgcgaaacccaaatccaaatacaattccaaatacacacccacacccacatacacatacactacgtacatacccaccgtcaatcactgaagaaaagaggggcaaacacaaaagaaaaaaaaaaaaaaaacctaagctccatagccccaatccttccaaactcaataccaaccacccaacacagccactccgatgcagaatctatttccggatcagatatgtctgaaggatcattagccaggttttccccgaagcttgatgttagattgcctttttggtatgcggggtttatgggcgggttgggaattgggctggggagtgcggttgtttcgtgctatttctggggtttgggttgtttggttggaacttgttgagggtgggtttgtttgggaatgggcttggacatgtttgtgttgatgttggagtgggattctttgagggttgagtgtgtgcttgttaatcctggtgtattggttgattgatgtacttctatgtacaggacaagtgatgcttgtggtagaaaatctattgctagctagctatgcgatgctaaactcgaaacaaacctctcgacgtctgagtcacttttgtaagtcgctcttggatggaatcactctccaacaccatccacaccagcttcgatgttgtccagcctcttcacgagccaagtactggcccgtttctctctcatcttcgtgctcaactacacaggcccccaccatgacccgtttcttggctttatgtttgacaacgcctccaattccgatgatctcttgtcggaaataacccggctcttcttcttcacggctgtcccgacggtcgttaggatggttatgtgcttcctcatttccatatcccgtcccctgtagactgcccgaagactcgtctgcttcacattctacttctagctcgatttcttgagctgccaagcaagtttctccacgaccgcatttgactccctgacagccttcgccaattccagtgcctagccctcccagataggtactgtacctggttcgccatgtccatactcggcggtacgttgtgtcactgttgcgtacgaacataccacactgatgacagagccaaacagagtctgcacaggagcagggagaacgctgaaaagcttcggttgtaaagctaggctgctcggatgacaaaggctgggtatcataggcagacagactcgggggagacaaagcaagaagatcggctagtggtgctgtctgacaggcggtgcaaagacgacggatgcggttcttaagcatattgctagttgggggtttagctgtgcaattctagacagggcggttagtcttgctttgctttcggcaaatgagtccagttaacgtacacgacaaaccaccttggaacatcgtcgacactcgccaaccatgtctcgagcgcatttggcaacttttccagcagttaggcgtccagagctcctggcctcctggctcaggagtcggatcacggacttgacgctgtcggggatcggagtaccactacgcagcagatctgatagtgtctcaatgtattcattctcgcagcgtagagtttgcttgactagttggtggcggtagagtgccagattcgcatggaattggcgacatgtgcgggatagggcgtgcagtgtgttaaggtccactgatcgggcgatctctttaacgatcctgaatcttccagtcagcactacaataccgaaccagacgcaaagtggcctggttctctagagttgcgtacggatagcagcccagagcaactgagaaggcattttgattttgattctgttcttccaagcgaaactgtgaagcatcgtgtgttgggtcgatagaagtatcatcgtcagtagccagctttgcggactgtggagctccgacaaccatcaacttggacagtgtcaacttctccggttcagcgaagtgatgtggcaaagcatcgggaccatgcgaaaaatgattcttgctgaatgtatcatggtccaggtccacgaaaactaccattgtgttgtactgaggaagtaaaaaagatctagatctgcactgctgataggagctgaagagctggtagtggcagcgcaaagttaaaaaaacgaacaccagccaaatctttaaatgcaacagagaacttgagcttctcttgcctttaaagctgaattatgaatttaaataagatattgttacgcggtgatggaaagccgtgggatgacgcggttagggaagttgatctccgtcttcggtgcgggaccacagcaacaaacaggtggttcgtctcggtgatcaagatgccgatgagaaagtctgggtctgaatcctgatgcggcttttcgcgcctattcagcctgttttggattgttcctgaacagaattccaggggacagtagataagctccaaagcttcttccacagggttcgtagttcttcagacaatatcttatcgatcgatcagggaattgatctttcggaatcacgcgcgtgcatctgactgggttggggtcacgagtcgccgctttccttagtttggagacatcttactccaccttccaatttaggaaagatcatgactgaaggcggactttccccgaatccttctctttcactaacaaagtcgtcttgatcatatatcaagccataccaagtcctgttcaatgtcatggtcaatgtcgtggtcatcgatgggctccagtggcttgtcacatgggaccgacctcgtcttttctagcctatcaacgactccaaccgagcacgtaaccgataagatacgatgactccaactatacggtgccttccgaagacaactcggcggggtaaaggaaactaactatggggaagcctataactaatatctcggccgaaggcccctcgatcgtactaaaggaacacaagttgccttctcgttctctcggtgtatccttcctatgggtaaggccttatttcacgacgaccgcagaagcaaatagttcaacccaaaatgcccctcaattcgaaagccgtctactctagactgaaccccgacttcgttccattcacgagtcggagaagtactgtgcatagcacaaatgggatcgtcacttgtacccagcctttggcagctgctgcgggccaaagaattctgcaacagggaggaaatgctgcagtatgtttttacactcaattctcctttcgtccggtgcatactaacggttaagaaaggatgctgccatagctgtgggtacgtaatgtcaatcttgtcggtacaatcaaacgaagctgacacaatatggtcgatagccgctgcattgaacatcaccgaaccctcatcaacgggtattggaggagatatgttctgtctattttacgatgtcaaaacgaagagagttcactcccttaatggatctgggcggtaccctgcgaatgctacgctagagaagatccggaaagacttgaatgtcggcccaaatgacgctggaaccattcctatgaagagtgttcacgcggtgacaactcccggcgcagctgcagggtgggttgacaccatagagaaatttggaagtggtaaactgtctttggagcagatcctacttccagctattgaacttggcgagaatggtttccctgtatccgaattatcgtccttttttgtaagtgaaacactccctcctcggaccttctcaactgagtcatgcaatgtcacgttatatcagaatgtggactgatgggcaataaatgaaagtggcgagaaggtgaagatctccttcgacaggcatccccaaatgcacatgagatgctcaagccagaccagaaggctaaagatggggtcagatcccctcttcctggtgaaatcttgaaaaatcctacgctggcccagaccttccgatctcttgcggcaaatggcaagaaaggattttatgaagggcgggttgcagaggagctggtgaaagttgtgcaagatctgggaggataccttactctagaagatctgaaatcccacgcagagattgggacccaagagacggaagcgatctccctcaagttcactggacagagcatcgccgagaagcagactgctggaacggatggtgaagacaaccaaggagtggagatttgggagcacccaccaaatgggcagggaatcgttgctctcatggcgttgggaatccttgaggaacttgaaaagatgggcaagattccaaagttcacagaggcccagcacaactctgctgaatatctccatgcagttattgaaagtctgcgtatagcgttcgctgatgcatcttggtgggtcacggaccctgacgtggagaaggtaccaactagcgaacttatctctccagcctacctggccgagagggcaaaactgtttaacccggacaaggcaactgatatccttgaccacggcagcccagcccacaaccattgcgatactgtctactttgcagtgacagacaaggagggtaacggcatctcgtttatcaatagtaattacgccggatttggctctggtatcatcccgaaggggtgcggatttacgttgcaaaatcgcggagccaatttctctctagtgccaggtcacccaaatgccctggccccacggaaacggccataccatacgattattcctgccatgatcaccaacgtctctgatggttctttgcactcagtgtatggtgtcatgggtggcttcatgcagccccagggtcatgttcaggtgctactcaatatgcttgcatttaactatcacccacaggcggcgttggactcaccgagaatctgtatcgctgctggctcaccagagctaggaaagcccgtggatcgcagtgtctacgtggaggaagggatcagcgacgaggctgtcgaaggcctgaagcgtctcggtcaccaagtaaaggtattgaaaggatgggagagaggcatgtttggtaggggacagattattcgctgccactatgacgatgggcaattggtctacagcgcaggaagtgaccagagaggagatggaatggctattccggtgctgtgatgtattatgttgtaagagatatcgccagggcccgatattccacaacatcaaaaagatcacataaatctgaatctacgattcagattgccctgaaggtcacctgtatagcttccctccgttagagatgtctggggatgtctaactttggagtttttgaagtaggggaggtagtcactgagtttgaactggtgtaatgggtaatgttaaaagatagtattgatatcacatcatatgaaataaagtataaaatggctatcaacatgaaagaaaagtattcagacaggtaagtacataacagaaaagataacacctttgctatgcctcctttacctgaacgctatgctatgattcaatcataaaacaggaagggaaaaaacaaacaaccaaaaaggggctttacatgaaataaatgctaaagcagaaacgatatcttgaaaagaaacaaaggccacactggaataaagaatgatctttttaaaatgtatggggaaggaaagggaagaagcaaagagaaaacgaaggaaaaatggagaaagagaaaaaagaaaaggaatagaatatagaataatgggttttcagtatgcagcaatagcagacttgaaaaagccttttagtttggaacttccgctccgtggaggagacggagcacgtttgtgtcgatggtgacgatgatgtccttctccgctatgacggtgatgacgttgctcaggctcttctttttgttttgcctgctcctcttcatcggcttttctgcgagctctacgagcttcacgtcgagctcgatcttcttcgtcggtctggtgagacccactggagcgttcagtggagcctcgtccctcgtgagagtggcgatggccatgagaacggctcgtagaagatctcctatgaggctcatagatgtttgcggcggctttgtcgccgttgatcttcagtaggggtttggtgtctgactctcctgatgtcatgtacttcagaaaagctctgggctttggcgttgaggactgcgcgtgtcttgaggaagagcttccacttcgctcgcgatcactgctgctagagtgttctgagtgtttgggtcttgttttgacaggcacaggttctttttctcttgcagagcgctcggtgcgttcggaccgtcttacccgctcgtgctctttctcgcgtcctgatgaacggcctggctcccttttcactataaccgtcttatctttccgtctctcctcagatctgatcttcttctcatgctgccgcttcgcctcatccaaggcttccgcccatcggtttgtgaagataccgccatgtttagtacttttctgtcgttccagtcgaggtggatagtcgtcagaggacctcttggagtgacgctcacggtccatgtcggccgttcgtcgctttttctttctgtggccatgagccaaaccggcggctgcggctgcggctgcggctccagctgcaattccagcggcagcttcggtcgtggtcgaggggtcatctttgagggaatcaacggtatctgggtattcgcttgtagggtctgttgcctcttcggacagctctctttcagcggctgaatcttcaaggtctggctcttctaaaggtacctcaccgacagctggttcgtcggtgacagtatcttcagtaggtgtatcatcgctagcgggggcgcgttcaatgataataggatcagctggtgctgactcaatgacatgcgggtccgctgcaggttcctcaacttgctcaggttcttcagatggagtgtcttccggagcaggttgcacaggagcttcagcgggagggacgtcatcggcaacaggaggctctacagcggcaggggtttcttcagcgggagcctcttcaacgggggtctcttccactggggcttctgcaacatctagggcttcgtcgacggtgactcctctcgatacagatggcgcgggcgcttcttcaacagcgacttcttcggcactaacaggttcttcagttactggagcttcttcgggaacaggttcctcaacagcaggagcttctttagcaataggtgctgcttcgggagcaggagcttcttcaataacaggtgctgcttcgggaataggtgtttcctcaacaggctcatcctcaacaacgggagattcttcaacaacaggggcttcttcagaaggcacttccttagttacaagtggctcctcagcaacaggtgactcttcaacaggtgcttcctcaacgtgaacttcttcagtgacagcagattcagccgcgggagcttcttgagtagtgggtggctcgggagcttcttcggcagcagcaggggcttcttctgcgaggggcgtcttttctgcaggggcttcttcgatgggagcctcttcagtgacggcaggttcagtagttggagcctcttcggcagcaggagcctcgtcagtgacaggcagttcctcggcagcaggcgcttcctcgacaagaatctcttcagcagcagcaggttcctcggtgacaggagcttcttcggcaacaggaggctctgccgccggagcaggttcttctgcaacagattcagtggtaggagaaggatcatcagcctgagcctcctccgcagtggtgggctcttctgagaccatttcttccggcgcatctgcagcagaaatttccttggaggcatccgcttcctccaacaaagcttcctgatcgttggacttctccacaggagcgtcaataactggggaggtttcctcggagccctcctcttctgccctttcttcttccactagatcttcctgtggctctggtgtagtagctggtgtctcaacttgtgtttctccggaagcttctgcatcggtgggatgttcgtcacttcctgcttcttcattgttggctaaaacttctgcaggagtttcttcagctgcgggctctgctgcctcgtccactccctcatcagccggtgtttgctcagcggcttccgtgttggctggctctccgatcggcttttctttttcagaagacttttcgtcggttgtggagacctctgcagtcacttcaccagcactagcactgtcctcagccccctcaggtacaatctcttccgttggctcctcttttggcggttcctcagatactgcctccggggatccttctgtttcaggagctccttcttctggagatagctcgactggaggttcttcagataaatctgtaacatgctcggcatcttccagggtagcagactcctcgctaggcttatcaacggaaggttcttcgggaacgggctcttcagaagtgggctccgctgccgtaggttcagggttcttatcgtcactagcagcatctgctccagcatcggcttggtcttcattgggaggtgagccgggttcagcggtgtcttctgccgggttgtcatttatctcatccgtacttagcgctgctgctgtgtctgtttccttgacctcagattcaacttctgcttcagcgacagcaggatcctggacctgttccggttcctcaggcgggggagtgggggggagctcttccactgcggtagcgcccttcttcttctttttcttgttcttctttcccttcttgcctttgcctgaggctgcgccttcattggtatctacaggcgcaggctcttcgatagcgggtacggcttccgcatgttctgccgggggactctctttaccctccccatccgcggcagcttcatcaactggcgtttccgcagattccgactctaccttatcagtagagtccgctggatttggttcggcgtcaatgtcagggttggctgaagctgtactttcctcttgagtctctgtagctgtcggttcatctgttggcgccttttcggtcgatgcttcggttccgggtgcagggtcagatgggtgatcttcggtatttgaatctgttgctggtgcatcggatgaagagttgcctgtctcatcgggatttgcgggctcatctgcaggctgcggagtagcttcagcatctgtaggtgggctactcgtttcctcttcaggaagagcctctactatctcggtctctttggagccgtcgtcaaggttatccttctctttggttgccgattcttcttctgccttagcatcttcacatacttgttccgcagcttctccgttctcaggtgcgggtttatctgactcggcagcgggaccatcttctgagacgccggtatctataagtaaggtcagctgactgtgtgcactggcattgtctggagcataccattcttcggctcttgatcatcttgctcaggggtgcttgcatctgtggcgtcctgttccgcttctgcgttttgagcagagccctcggctggtaactcgtctttcttgtcatctgaagcgctctcatccttgggcgtttgcgtcacatcgtcggcttctgcagcaggctctatcttttcttcgactggctcagcagcaggctcaccggagctctctacaggatcgggggacggcgttgtggcttcagacgattctacacatctttagtaaggaaagcacaataaggcaacggccattgctaacaacacattgatcaagataagggaagaggagcttccatggtcatggaccacacaaggcaatggaaaagggaagacttatgtatgagcttacctgcagcctcagaagatgatgcagtgtcagtcgaggaactacttgatccttcttctggagcatttcctgcctcagcggggttgttgccctgatcattgtcaggtgtcagatcgtctgttgatgtagaagcgacaggatagaatgaaaattgcaaagtatgacggtcgaaggtctgatattgacgatcgaaagtctggtactcaaatttgggaagctgtgtatactggatcggtttccccattttctgtagattcaaccgccgtttccggggcgggctcgataggaggattgctctctgggtttgataattgattgtcgttcactggtagccgttgcttattgttattgttgttgttgttcttcttcttattctttcctcctttcttggccatagcatcgaatcagtaatgttgtacaaatctgaatgacctcaattagagtgggaactgggcactagatataggtcaatcgagggagctttgatcaaccgcctgttggggtctagacagggccaggggcaaagggaataagaaaataaaagaacaggggggcgacggatcagaatggagtatgaaccgagatggaatgtgaacggtcaggttcggacagaccctgacgtattggcttgaaggcaaaaagtacaagcagcaaatgtgcgccagtccgcaaacagtccttttcgagaaccaagcgaggcgacgtatcgaacttcatccacgacccagttggacgggacaatttcgagctgcagttcgggcatgggggttggggatatcattgacgaactgcccaacggcataatcttctattgggccacgtctcacgggtcccataacacagtggacagagatagaaagtgggcgtatttccggcaagcatcactggggcagggagaaaaccggaagactgtcatctgcatgagaagcttgcagtagcaagcagtggcggcgggcctggtgaggagtagatgatccagaagggaaagcaccatactcagaatagaaaattgggtactccatacaatctgtagtattagtgggggtggtgccactgatcggttggaattggctttttttttttgctttttcttttttttcttatggggtctttctgcccgtcggttttttagtccacagacactccatttggactggatgctagtcgacgcgtcatggtgaaaaccaccagggcagccaaaaaggactgggatagcaaagtaaggctaattggcgataccagaccaacgcaaagcgatcacagccagccaagactagaatcttttgttaatgggcagcgaaacgccgtccatctagcattacagatggaggcgagatgcaacaatgatgctagagaccattagtactactccgtaattcatgctgtgtactccgtatactgcatctctgctaatcaatcagaggatttctgcccgacgcctgctccgggcagcggcagcaaattggacgcagcgtccgaatgggtcccgggccttaataaccctaacaattagggagggattggctgcagctaaggaagatggaacagggcggaccctcaaattactgtagcaactacccttcggatggtgaaaaagtgatgagagatgggatgaaacacagagagaagtttagttgcctttctccacacatgaacagttcagcaagtgccgttgatcactggaccgcctaatggagattagtggatgtcactgttttgtaaccgtaaccaccctcttctttccctcccgttcctcatcaattgaacggcgggatttatcgcagagacaaaaattaagaaaccttacaattaatatttgatcctgtgatcttatgaacgaggaaaaaagaaaaaataattcaattgacacaattacagaatagccaaccgaaaatcagccgaaaaaggatcattacagagtggactgaccgaaggcctgtggcatccacaaagaaagtgaggcgcgctgttctggcggccggtgaatggctgtcgtgcgcccacaagcagatccatcgatatcggaagaatcacaaacagagtcactaaatttcgagaatgtaccaaaccaacaacgctagactagatacgtcccttggctaaaaaccgaagctgccagcaattaatccctccacacaatggacggcgccatcatcgagatccatcccactatggacagctagcgttcgacaggccaatacccctttcacatcgcgaaagatctatcgttgcgagattaaagcttccattcagaatcgaacagctagcattcacatcgaatcgactgccctagatctctgcagtatcgtcgagcccggctggtcgacggggtgcaaagcatagtgaatgccctgacgtaacatgcatcggcaaggcaccgtttcccaccacatgttccatacatcttgtactggaacgtttacggcgtagggggagagtctgacaccctcgagaaccttcatcgcataggtatgatcttcacggaccaatagtagggtgtaggacccgaacatcatcccacggcgctcaatgcagcggcccagatatgtactttttgccttacgtgaatccttgtatgcccccgcctgaccatgatgaccatgccagtaagttaatgcaggacaataatggcctatggcttcgttacgcatttcgccgtcttggtccgagctaccctagcgctgctcgggtcaatgcgtggtttctattatgggcctagttcgtagttacacgatctatatcgatagtatacgggaggatcatcgactccatcccatgcacctcaaatgtcggtctcaggcagcatgtgggtacgataactgactagaatcacctagacaagaatataaagaagctaagacaggtcagatcggtctccatcctgctcgttgtctcgctccggtggctggctctgaatcaagcgagagaaaataagcagctggacagtcactgagacggaatttaggagaaaatgggaagaactgttcgtggatcacgtttggcagctacctttgctcccaatgaactctattcatggaatactccgtacttgatgctgcccactgagttattccacggacctatgatgaaagggcatgaacaggtaaccctccgaatttaggtatctgacaactttcaacttcacattagctctaaaaataacatgactcatgcttcgggtatctttaaacagcaacatcatccagggagcattatagtgattatccagaccaaccatgtgacatatccacagttccagcctttcgtacctaattttgcctcttccaagatggcgagatgcgggcgatgatgatcctgcaaccaaaacaaatagcaggactgctatatacagaatgcataccatgcttatgacaatgcatagcagcagcccaacttgacaatggacaaaagaagaagattaatcttttgaagttctagaacgccacgtcttcacaaggcccacaattagacagctggacttggcgaatcttgtcaatgcctgagtgcatccatcgactttctccaacgaggcccgaagaccttcatcgcaaacaggacagagctgcttagaaacgcaacaatcccgagtatagtaaacagccatccgttaccaatggcgtcgataataggagctgtgaccaaagagccaacgcaggagaagatattcctcatgaagttattcagtgcgactcccgaggaagccttcttgggcatgaattccgtcaacatcgtcgttgccatgctaaagataagcatagatcctatgccaaagaagaaatttgcaatcatctgcggaaataaaccatcagttcctccagccatagagcacagattatgaaaagggaggagggaatgaacgccataccggcacaagccagaatacaccccggtctgcggtccagccataccaaattaacgcagcagggtacaaaaaagcaccaagccaggcattctcacgcatgcgatcttcggggtgatagatcaaattgccattctcatcatatctttgtgcctttctagcttctcgctgcatgatattgtccatccatcgccctccaaatgtactggcgacaacatagcccaaagaatttgggatatagagcagaccgacaaggatcgtagtgaagttgtatggatcgctcccgaaagtgtgttcaacactgacattcaacacataaagagagccgaacgtgatacttgcgtagtataccgttagtaggactggtggatatcgaagataaagcacgattttcagcggatcgacgagagccatcttgaggaccttcagccaccttgtggttaaccccacaacctgccgggaagagactcggctcagccgacgtccaatcggttcctgttgctcgttacttgtattgggactaggggatttcgccgagatcaacgtctctggaagggcaaagaatatgaacgcgacggttatgcctccataagctgctagaaaccataatgtactcctccacttccaccgttgagccaaagcgcctccaacaataggagccaccaacggaccgcataatggtccaaggtagaatatccccatggcacggcctctctcttgagattcccataggtccgcaattgtccctgctccgaccgcctggaccgaagcagaagctccaccactgagcatccgcatgacaatgagcatggccatcgacttggaaatagcacatagaacattgaatatcacgaagaggcaaaaggatacaaggtatatagtccgtcgccccagcttttcactgaaagatgaccaccataatggaaagattgacatactaagcatgtacaacgatatattgagattcgccacagtggttgtcgagtttaactctttagtgacctgagagagggcagctagacgcagtaaataaccatgtctcatcaagaccaagttagagagggaatcgacttacggaagagtattgcgcttcccataggggctgtggctcctgcccacgcaacaatgaaagtgacgaaccattttttcttccgagaataagtcttcgggttttcaacttccgccagcagcgtgaactgaccaaagagtcctctgcgattcggtcgcggcactacaaccgcagcatcacggcttgtgtccgaggcataggaagggcggcattcttcatcttttccttcaaatgcttgaggtggatggtcctcatgtgatatggaatggagatcactatcggtatcggtggtgctcctttgtggtggatccatcgcgtgtctctcatgctctctgcgggtataatctggcggcatcccggcagatgtgccttctttttccatggttcgtcgtggctggttatcttgagactctttgtattgcgcataaattcacttaaagagttcaaatttgagggaatatgattatggttgacacatatcacgtactccgtttgccagtcacacctccgatttagccaagaagtcaattgaacctcactgcggcacaaaaagagaaaaaccgcgaacaatagatgaaaggacacgcccgcgtcaacgctttgcagcgtggagatctaattagcgagatataaggatagcgatatgctctattctcatcttcctatcgaacatgaaaaagaggtgagcggagagacgaaggggcaaagcaaaaaggttagatgtggcaaaaaggaagaaggaagaaaagcaattgtttgaatatggaagctgcaaggcttgtaggagatccctttctcttatcggcaattattatcaaaaaggcaggtgtagatggcatggagattcccaaccccactccaaagcgggttgtgttgatctccaggtactgaaaattttctgataaccttagcgccgttatactccggagtaggtcttcacagtctcatgtatctgggccctgataaagggtgggttttgaggattcctggagtatgattcatatcgattcaatgcttcggatattaatccgcaaagcagtatctaactttaggtaaaactcctagaagctttctctggtgtcattcaagcaccgcatataaccatgggtagggcattgcattgctattggcaactgtcaactccggagtatgatgaagaggaatgtggaaccgaatctgggccaggatatccagtcacagtgaagtcacggcgtgccgttccatccgaccctccagtcggcagccctgttgggtcccgcttgcgggttctgtcgcgccctgaccatgtttaccgaggtcaagcattcctaccccagacgctttagaagttgtagatactgcacggagtacaaataaataataaaagagacactccggtatgagcaatctccatgatgtagttgcttctaccctctacactccatttcaacccacgatggccagatcaagaacgtcattgtcgctaatgtgattgtgatgggctaactatagccacaagcctctggggctattggactggcatctccagtctcgcatcgaaacaatacaaaagtgctatactgagtactaattgactgtactagttattaatgttcaacaactcgccctattcgaaagcagctcaagaccatcggtttccggttactgttatcatactactcacaatcatgatcaagagactgttgaaacaactactgcttaaacccagcagagtccacaaaaagcatcttgggctgtgatagatagatcagcccttcagattgcagatcaagcagccaacaaatagaggaagaccaagcaggcaccagggtccaaatccaagaattaacctacaataagagctagtgtagtgtacgtagatcagcccgattatactccgtagcccatctataattatccccaggcctctcaagaccaatgagaggcttgccctaaacgcccagatctctaggccacaggtcttcctcaatgccgctaagcaattgatttgagaattgtagtataccgcaagcaaatatatcacgaacagcatctaacccctctttctagccagttccaaaatcatacttctatctgtaacactgcatttatatttcacaattggcttggacgcaataactcagaagagagccattctcacttgaaccatgaaacgccaccaaggtactaagatgcaattagccataatagtgttatcaaggcaaacatcccgtttcccctctccgtgccgtctgcatcggtgcccaacagtagcagtcgactagccaatggccaatcaccaccatatacctagaagccctttgtactgcttatgtatctcgtcttatattttaacatcgccaccagagatagagagcacacttgattggcgcacacagtaatcacaataatagaggatcaatataccagcaagccacaaaattgctacatacatacatatgcacccccaataaccaccagcaactcccaccaaacaacgcccaaacagaacaaccccacatcaacacaaccgcaaacccccaacattccatcaaatccaacctgccagcccccaatccccaaagcacactacatactcaaaatgtctccccgattcagactcgtattcttcgtgcccccctcggccgtatcagcctgcaagacggctatcttttctgcaggcgcgggccgttaccccggccaagggaactacacggagtgctgctggaccactgcgggaacctctcaattccgtcctggagatgcagctaatccgcacatcgggaaggtgggcgaattggagacaacggaggagatcagggtagaggcattgtgtgctggtgaggatattgcgagaaaggctgttgaggcattgaagaagtaagttcttttttattaagaatcgagtatagagtgtttatgttcgcttatcttgttctgtgtattgtctagggctcatccgtatgagcagccttcttatggtgtttataggatggaggatttttgagtgtagttgtttctccttgttattttgtgtgtctaggagtttatttgtattagggcctggcttttagcagccggtcaacagtgttgtacgctataagtttgatattgaaacagtcatgacttagtatgtcttttatctcaaagccaagagttgggcctgtcactcgagcaggattatcgcatgttggaaaagaaggagaacccccctaaaaggcttcattaaacggttgctagacacaatatatataaaagtcaaaatcgccaagctaaaaacaaaaaagtggcgcctgtatcattcgtagctggatcatagctcgtcaaagtaccctcaaatataaggagtaagccaatttctattcccatcccttttcttttctttaaccccaaagaaatgaattcaatcagaaagagtaatgaaaagggaagtgtgaaagagaccgcactatatgtaattgcaactgtgtaatcttgttgccgagtccagaacccgtcttttctggtccttcacaagcaatgacgaccgccaaatatatcaaaagaaagagcaaaacacgtgcctcatgcaacatctaaatcgtagtaacctagtcactgtcgttctggattgctacagctttgatgtaggtctcgtatggagttatggctccaagggcacgtcgctggtgagcgttaagtatctccagcccatagacaaagctggcgttgacccaaccgaacctagaaatagactctgttagtatatgtttatcgagagcattgaagacaagacaggtcttacccttcacgaggtgcacccttgaaatctacaccttggtttccatattcagcatcgacccgatgcgggtcaataggtcgagtgacgtcatacttctcgacgacaacaccgttgaagtcaacaaaagctttggtgatcatgtatagccacttgtatgctagtcgctcggcttcctcctggtagccgtagcggagcaggcccgtccatgccagcatctgctgcggggcccatccatagggaaagtcccactgccggttcggccggtctaaactgataataccacgcgattcttcagtacctgaaagcagaccaccgtaggcctcaagctttggtagggccttgctgaccaactccgacgcttggtgaggggtggcgagacctgcccacattgtccagaaggttgtggcgctctcataagaggttcgctcttgcttagctgtgtcgtagtcgaagtacatccccttttcttcgtcccacaaataggcatccattctcatttttcttcttctagctctgcggtcccatacagatgaagattcgcttgcaatatccttcgactgttcagtacggaactcaggggggatctctagtctgtccttgaaataagtccggattatacgagcaatgtccacctcgtatttgtaaaggagagagttcaaatcaaccgtagcaatattggcacaaactctctccaaacggtagcttgtatcgtgaccagattctcggacagccctatcatgcaaaaagtactcgtcaagctccggctccttaacgatgccgttattgtatgcttgaacgaagtcatcaaatttcatgccatgcttctcagcatagggtgttagtagatggaggaaatgcgttggttccgtttctggcggtacgcccaacccttcagggcgataccgcgacagaccagaaactggatcaaaccgcggctcggcggtccagacactgtagtattccttgatcgcagcgagtatcgaggtccgcaggaactccagagcatcgggttcgcccttaatccgctcatacactctcagagccatatcagtcaagaatggcggctgggaacgtagcaggtaataggatcggttggcattcaggatctttccatagtgtttaatacagaaacagaagttgatcaccatggacttcgctaaatctactctgttgctgaccaacagccccagagactccatataactgtcccacccatacaattcattgaaccgtcctccgggaaccacaaatggcaccccggagtattcggttttctgggtagtctcatcgtacttcttctccattgccaaggcgagaagaccgggtttactgttgagatccttcacgaactctggagtgatctccgagtccagcacctgcacatccagacggagttccgggtgcgcctcagcgatccctctataatactccacctgctctggagcgcccggcgggatgtaaatacggggtcgtgggtcgtctgtccagtccttgggatctcggcccgctacctcaatattggacccatcgatccgacgagtcagggcgttccagaaagaattcttaatgagacgggagagacgcgcgactgggttctcgctcagacgagcctcatcaaggacaatgactttccggccatagtccttagcgatggtaagttcttgcagaaggttggagagcatgtacgttcctcgcacatcgaatttattgtatccggaagaagctgcggtcccgagggaaagcacctatttcacagtttagtgttggcctggcggggaagaggggctgaaagaaccacgaatccacgcaccttgggtcctacatcctcgatggttatctgcatgttcctgtccgtatcctctctttctaggaggctctccagtgtttgttcgacatcgataaggaatttgcggggttgagccgaaatctcatctgttgaccacgtgcgtcagtatacctgactcgcgatcgctacagataggcgaaaaaacacctaccgtgacttcctcttcttgccggaattccaccaaggaaattctggatatcctggcgattgaactggttcaggttctgtcgtacacaccagggatgattagttgacattgttggccttctccggggttccctactcaccgttgagaaggcacgtctgcgatccttaatgcgcgcgttggcttcctcgtcaccataatagacgtcgggatgagaaaaagggtctatggactcctgtctgcggtgggtcccatttgacgagctcatcgtctgaagatttccgggaggatagaaggatagggaagagatcgaagggaatccgggggtttaaaaaaaagtagaggaaaggtttcgggagaacaaggatgctggcggagcgaaaccaatgggcacgcaaggtcggtaatgtggcgtttaggcggtgttcagcggttcgttggagaatttggatggtaactggtaccggtatagcagagagttggacaaagaagttgaaggtgaaggcgattgatttaagaataaagaactattcatagccatctcttcgcagaattggccacagttctagtgcgattgttggcatccttttttagtaggattaaaatgggtcccgcgacgtcacaacactaaggaatgaatctattgaaatctattcgagaatctttcctccgtgggacgacttttttccccctttgctttttccaagagatagcggtgtagaaatgatcaaaacagtaagaaacgtgctcctccttactcgtgaagattttaaaaaggatatccaatctatgtcttccagaaaaaaaaatgtattgttcaaccaacagagcagcagtgccaaccgaaaggttatgacggcataactaatgtcatcgctccaccgacccataaaaaataaaggacagaagctttcttccatttattaatattcattggggcagctgatattcgcacggccaattccccccaacgggcacgatcattttattatctgtcattcattcttatctcggcctctcaaagtttcgcgctgcttaatagatccagcactattggagtcaggcgacatcacgcgctcctttagtcttatctgtcgaatttctttatcctcccttgggttaccttacacagtacatttcctttactaagtgctttccatacactagccaggtttcatcgcttgattgtcaaatgaggggtaccataggtcaccaagtggtaattttctgctgtctattacaggttccattcacttaaaaacatgtataggggtctattcgggcgatgtataatcgtgtgattcaaaaccgatgctatttggtgtgatgccgtttcactttcaggtctcggatgtccaacggatccaattttccgtccgtatacagattatccgactcagaatctacttgatcgtcaaccaggcgttcgttgggaagacgaatagcccgatctaactgatagggcagtccgcggttctttcctcgaatcatcaaaaggcagacaacgactttactgaaggtcgacagctgtccgcttaaagaagtactgacccctggataccctaagctgaggccgacattggcgctatgaaacgttaacaccactctagagtggtttcaagggccagtagcttactatgcagaaatagcctcaaagaatatcgcaaagacggtgagtccctgttctttattaacctcggctctgtggctgaatattcaagacgacctcaccggctcagaagggttcatgattctgtttgattcggcaacgcagatacaaaatatcccaagaaaaatgtaccacagatcgaagctgagttggttccgcacgtgggacaggacgtaattcgtagtgttgctctcgtcgacgacctcaccgtcactggaaaacaatccaagtgaacgttcttcgtaggtattggacgcacgcatactaatggcgatagggaatacagagatatacatcatgactagtaggctgaattggacggctgggtttacatcggcgaggttgaaactcgacgtccccgtatgccgtgctgatgctgcctggaagatggcggccagcacccgcggtcccccgggcagggtgttgacagcggggttatgcagatccaacacaacgatcaagagaacatcgacgaagttcaagacgaagataatcccaaagagaacccaagttggtttgctacggaaaagcagcgtatagcaccgacgaggatacttcaagaggtaatccaggggctctctaagtgacgagttctttggagtacatctgtatgtagtccaaataatgagacgcagaaaaacggggtagagattgttcccagcatatgccaagaatgtcataatcagcatgggaaaagttgcgtcttggaagctaaccattgagtctggggtgagggtgaaacccagattgtttgccatcgtttgcgccgcatagaacgccctaagagtgaacaaatgagtatacgctcagctccaatctacctaccgcactgccaaggatgcttgaaattgtcccattattcacaggtataatcccgatcggcaatatgaagtatgatactgctcggtgatgcacttaccaccatatatgattctgcccacattcctttaggtactcccggtacttaggaccagcatactgtatccaacccactagacatattgcaccaattatgtggagaccgaaaaagtaccctaccgttggagttagtcttaattcacctgatagctttgatggcaatatcggtacctagaacggtctttaataacatcttaagagcccgatactctatacctcccagtctttcccggtcttcagcagtcaggttatagaattttgaattcctgccgagagtcgcttctgctgaaatactgggaaggttcgagctcttagatagggagacagcttcgcgaagttgtgagccttgagtcctgcttggctgtgaaccgagcacaaacagggaggaagcaacacgttcgagcgggttggaagtatcccttaatcggcggcgaatctctgacttggcgtcgtcattttcggcatattccgaaatttctggggtcaatgagctatttgtctgtcgttcctgttgagtaaaaggaacaagctcacataccatccttggctgctctttcgtctacctctactataggttggcctttatttcattagcattaatttgatgtccagggcaaaagtaagattgcatacctctatcgcgctcccgtggagaaggaatgtatagagccttgttgttgtccgcaaaggagatacgacggttagttagctgaatagcatctaggtccgggccatctggaggcttcgattcagttagtctacttgtaaaatcagaattttagtaagcttcacactgaaggctataaacagaatgtaaggatgggttcccacgtactcttctggcactgtctggcttttgctcgagtctgccaagtgctcgttttccgcattgatcttctctccggcggtctgttccgggtcccggactcgaattgtattcagtttcctgggttgtgcctcctggtcatagtcatactccttggaagttactgaacgtgagcttgggcgaaatgcagtgggagctatcagatgatttgcttcagtacagccccgatatgagtaccaaagagccagttaagtacctgtctctctcaaacgcttctcaaaccaatagagtcgcacgattaccacaaggatattggtgaagcacatgttgcaaatggtgggaatgaaatataaaaataactgctggtatgtttttaggtcttttaaatcgacactgaacgaaaagttgctcagcgacattcgtgtccgtgataattcttcaaagatgataggagacggtcagaccaacacattaagccctgatactgtggcagagctgactccgaaaaagaatgcatcgatcgctctcaaattgccacagggataaagtatgattatccccaatagactgcagagaatgatgtatgtatctacgctcgtgagcaagcaagtcagtactgttcaaaaatacattcgaaatctttcgacatacaatgcaaggtgatgaagttcaccggtggcttccacatgttgactgatagcaattgatcatatgttggaacggtcgatatttagggcacactggggctagaatcgttaggggtgaagctgctgcatccaaaagcgcagcacagggccatgggtaattcttcgaggtcttgaggtttaaatagcatatagatctatattaaaatcaaataatatgactgctcacgtgaaacgcaccaagtaattgtattaagtaagtagtatcagattgagggattaatccaagccaattgcagccgccgcgagcctcaaccccacgcgatccgtcgctatggtttagatcgacccccagtggatgatcgctagcaatataagagggaattttctgggccagtactttcttcgagaccaaaacaaatagcctgcacactccgtacagccaccctgacacttcagcttaaaacgaagtcatccgtgagtcgatcctaatatcagaagggctgatggcttgcgatcctaaatgaatatgctttttccctgttgagggcagcctggcgatacttcccgcgatcttccgccagttatggcatatgtggcgccgttcagttgacactgttgtgtcatgacagtatgcgcacagagcgatgtagatgctcgatgatgtcaatagggttcagcacttaacgaataccagtagtaaactagtatgcacccgctaagaaaaacgtgtcaggctggaagtctaatctacatgaaaattgcacataatcctgcaggtgcagatttgagaaaaagaaaagaaaaggttcataaatagatatgcaagttgaattttaggttaaaccttctgtaacaggacgctatcttgctcatcgcaggattgtggaaccaatattcttgatatgtactacatcaactcgcctagatcttacagcttggcagcaatagcgctaccaccatccagtgtgatagtggctccattcacatacgagccagcgcgactgctcaggaataagcaagcaccggccacatcttggggggtaccaatacggcccagtgggatatttccttcgatctgctcccgatatgtttcaagggtagcagccatcatcttactctcaaagggcccgcaagccagtgaatttgatctgtaggtaactcagttagaaggcgttttaccaaatcagcaataacacgtacgtgatgtttcttctaccaaggtggtttgcaaggactcggctcaaatgatgcaagccggccttactagcactataagcaaacgtctcaagtgctgggactcgaagaccatcgatgctaccgatgttgatgatgcgggctgggtcgcccgaagtagctgccttctccagcaggggggtaacaagcctcgtcagatcgaagactcggtggaggttcagagtgagaaccctagtccaagcagaggaaggatattcatcgtaaggagcaccccagttcgatccggagttgttcacaagaacatgcagctctggttggtaaattagttagttttaagacgacagcccagccgaatgcgatctctgggtggcgttagccagaaacgtactgctctcacgctttccaagctcctcagctaatttcttaacatcctcctctttgtaaaaatcggcggggatggcgtgagcctttcctttgccgagcgcattgagctcgtttacggctttctcacaggccttggcatcacgagacgagatgtaaacagtggcaccgttcgctacgtatccttcagagatcatgcgaccaattcccttggctccaccggtgaccagcaccactttgccctagacacagcgttcagtacggacccaggtgctttcacggagtttcatcgctaaccttgacgtcgaaaaggctctgggaatccatgatagcagcaccaaacagtaaaaattggcaactaatgaagtatcagattgttgtacgggaatggagttcagtataattttaatgtggatgtagtctgattaacgtcaaggacatccaggagtagatggactttcgtgccatataactactactctagctcctagctatccgacggccgagattactgaacggaagataccgaggctgtactacgccgtccgggaaaggagaaacattcatgcgatctttgacattgtttgggatgtacgccaggcttagccagcccagagaatcaaaaatcatgataatccctgggtgaaactataagaacatcttatcagaaattatattgaacctgggacttgaatcttgatatctgatcatggccaccaccgagttggcatggaaccaccaccagttcctaaaatccgatgcgctatacctttttaggatgccatctagggcagccagcaaagggtttgcggggctgtaacagttctgttagatcttgagatggcataccaacagcaacattttccacagtttcatagcttgcgttcttttcataattcttttctcttttccttatcttgatttataattagactgatagattctcttttgctctatattcgcaacaataatggaggagttattagcaaaacaccgcaaggaacaaaaagatctccaagcacgcatcactcagaagaagaaatctgccacgaagaagacccgccgaggaattaacgaagaatgcgagagacttcagagggagctttccgaacgacaccaggccgagattgcagagttgaatggcgagcctgccccgcccgttgacgacctcgacgatctcagtttgaatggaactgaagaagataaaacacagaaagaccatgccgatagttcacaaaatcctccttcgatagataattctccagatacatcttcagcgacctcagagtcctccgccccctcaccacgacctaagaaaccaaatcgccaaaaggctcgtctggcacgtcgcgccgcggagcaagcggcgcagtctgccattgccgcggaagaagctgcaaaacaaacggatcatcgtggagatgaacaagaggtcatggatggtgtttttaaacggttggggttgaagcaggttgagataaagcccgatgggcactgtctctactccgctattgcctaccagctggaaatgctgggtctgggattgaaacctgacccaaaaagaatcatccttgagaacccgactcagtcccgcattgataccgtagcttcccctcagcacgatggctatagagcagttagggctgttacggccgatttcataaacgagcaccatgatgattttgtgcccttcatggaggagcccgtggaactatacacacgcaagatcaagcttacagcagagtggggtgggcaattggagctattagcgattgctagggcatatggcgtggaaatcaacgtcatacaaggtgacggaaggatcgaaaagatcgaaggtgatactcaagagtatgatgacgaacagaagagcaaacgcgttatttggttggcctactatcggcatacgtacggtctcggtgagcattataatgcgcttatgaaatgatctcagccatacacgcaagtctatgtacgatcaaagccttcgtcgtcgcgaaactcgggttctgctttaaacctcttccttatcaggtacactttcaagcaaggattcaattcccctacttataccccttgccgtgccacctatggcactgtagtacgttgttggggttcttcctcgccgagacctctagttttccggcttcgttagggtccgatcgtatcgaccataggcaatgtggacgattctctccagacgatttagggttgcttctcatgccttttgccaaataaactctcgtgccaggtggcgatagctcgattatagaagtatttggggctcgaccgatacccacagaaaaagcgaatgtgttgaaatacccagtttgggcgcattggctagtcaatgcgcgaacatggcatgggtaaccaaaagcatttccctcatttgaggattagcatcgcacataggaaggatacgcatcattacgcgttttcatcatagaccggtccaccgacatggaaactcaacgtaatattctcatgcatactatcctagaacaggttgtctccgtatcttgtacgaacacattcaggcactgtcctcaaccctgtggaagatatcaagctgaaaatgagtggattttcaaccttacaagttctttttccagaagtctatgacttagcaagcttgaatatattccagaccacagaagacacgtagtggaagaccatcatctattggtctgtgcgatggtgctcagccctgtggggtatgtctgggcgcttactagcaaggtagatggatattagtagcaaggaaagactgccatgaatgatatgcgacgcatcgagtatcagtccctcactatgtcaataggctccatgatctagatacataggtactttcatatccagcagtatgagtatacagattgccaccgtgctaagaaagccttggacgaggatttaagtgaagacacagacgtacatagatcgtgtgctaggatgtaaagctccatgggattctaataaggcagcatcctcgagtactctctgtatcacgccgaatacggacagatacttcatacatttaattctccatgaagataaatcacattgacacatgcatttagggtgggtgcattgggtactgttccaagacatctacaaatggactctatattaattccagcatgtgaattcgccatcgacctgcacttcaggtttcaaattatatcattcgttctatacgagggatttaccagaaaccccctcatcatcgcccagtcgcacctcatctctctcccgcttcctgtataaaagtgatctggctcttcggtcaacgtccgaagatttatataccgtatattggctattatccctgcagcagagactcatcgagtcgataacgaaacgataatggctccttatttacccgaggcctattctcgtgcatctcaagagtgagaccacaggcgcttgtgattggtaagttgactaccgaggttcttgcctctctgggactaatccgatattgcctgtatcaagatcgaacttggaagtcagttccgcaacacccgcggagtgtagactagaatactgatgtcaaagtcatccgtggaggttaagtatcacggatctaatctgccagcgaccaatctcgttgaaatgatccttgttgctccgttactaatgcgcggttgtggggaagaaagaaaagggtgaggtttttaccccggagttctgatgactcagaatagctgtaatgtagcatacgagagattacgatagtgggatatacttttgtctggtacgtattgtcacgtacggtcatccagaataagcacatgttccgacgtcattttaactttctttatactagagtaattcagaacgtttgagattcattccgccgtgtatctcgaacaaagtgatcaattgctacagaaaaagggtattatctgctatacaggtatgactcaatgcccggtcagcgattttagggccactcctattagggttattgaattattaggcgtgcagatactcatagtggcgaatgcatcagaggtccattagaccgaggatcttcccaaagtctcgatcctctcttccgaacgcagcaccagtcaccatgcccgattatcggcattggcttgtgaatttagtttacggtaaacctagtccaatggtgactgcagaagatcctggtaacttttccccggttgacgcgaagccggagctctgtgacattccttcttgtcccgctgagccgagcgtttaccgacgacaggtcagccctctgacgcattttcatggcgcgtgcaactcaataagtaccttggctttggcctggtgattcatttagagcttttgaatagcagactctttttaatctttctctcccccttgattttcattctttctgattatcagtattccgatcagacaaggggactatatccactgcattagtacctgctgtattatatcattgcatttctctctatatttattcccctttaaaagctccttattatcttcaacaccatgggttttctcgaggacgaggacaagaagtacttggacgacgtccaggccgtcaaggcctggtggaccgattccagatggcgacacaccaagcgccctttctctgcagagcagattgtggccaagcgtggaaacctgaagattgagtacccctcgaatgtccagagcaagaagctctggaaaattctggagagcaacttcgaggtatgtattcaagtcgaaacaagtcgggacagtagctaatatccgattgttttagaacaaagttgctagcttcacctacggctgtctcgaacccacaatggtcacccaaatggcaaagtaccttgacaccgtctatgtctctggctggcagagctcttccactgcttcctctaccgatgagccgtctccggatcttgctgactaccccatggtaagctccactcgatttgaacacatcggattaaatagctcccatactaatcgtcccagaacactgtgccaaacaaggtaaaccagctatggatggcccagctgttccatgaccggaaacagcgtgaggaacggattacgacacccaaggagaagcgcggaaatgtggcaaacattgactacctgcgtcccatcatcgctgacgctgacactggacatggtggtttgactgcggttatgaagttgaccaagctgtttgttgagcgcggtgctgctggtattcacattgaggaccaagctcctggtaccaagaagtgtggccacatggctggaaaggttcttgtgcccattagcgagcacatcaaccgtttggtcgccatccgtgcgcaggcagatatcatgggtacgtgtgcctatcctaattgtggctttaaaaagcgaactaagaaaagatcttgtcgactaactatccccaggcaccgatcttcttgccattgccagaaccgacgccgaagctgctactctcatcacctctaccatcgatcaccgtgaccatgccttcatcgtcggctcgaccaaccccaacatccagcctctcgtggatctcatggtggcggccgaacaagctggaaagcagggagacgagcttcaggctatcgaagaccagtgggttgctcaggctggcctgaagcttttcaacgatgccgtcattgaggccatcaacaagggtgcccactctaacaagcaatccctcattgatcaatacctgaaggctgctaagggcaagagcaaccttgaagctcgcgcgatcgccaagaacatcactggacaggacatctacttcaactgggatgcgcctcgcacccgtgagggttactaccggctccagggtggcacccagtgtgccattaaccgtggtcttgcttatgctccattcgccgaccttatctggatggagagcaagctccccgactacgcccaggctaaggagtttgctgaaggcattcacgccgtgtggcccgagcaaaagtaagtagaccggcatcaattgatacctacgatatcgggtgctaacgaagaacttctagacttgcctacaacttgtcgccctcgttcaactggaagaaagccatgccccgcgatgagcaggagacgtacatcaagcgcttgggtgctctgggttactgctggcagttcatcaccctggctggtctgcacaccacagccctcatttccgaccagttcgccaaggcctactccaagcagggcatgcgtgcctatggtgaattggtccaagagccggagatggagcagggagtcgatgtggttacccaccagaaatggagcggtgccaattatgtggataacctcctgaagatggtcactggcggtgtgagcagcactgcggccatgggcaagggtgtgacggaagatcagttcaagcactgagctcaactcacaagccgcttttgatgattttgttttgtttttagccgacttcgagtacccaccaggagtttttgatgtatagattgtagcttccttgatgaaaaggatcgtttttcatagcatgatctagttatcgcattcttcttttattcgtgcaatatctcattccttgtaaaaagtagatagtagtaaagtatcagtatccttggcggtattccatactacctactgtacaaagacccttggataccgaaatgacaatggttaaaagaaaggcggtctgaggaaatccgcgctagtgaggcctcctggacctcaaagctcgaaaacagccctttactggaaaaccgtacacccttctatctctatgaaaccaggttatatgaatgtaataattgaatataatataatacaatctatgtctattcattctagccagttaagattagactctgagtgttgacaagtccaatccaatgaccctctaaaaaaaacacaatccgatgaacgacctcaaaatgtgttcaaaaattctgccaatcccgaggcgtaccgcggttagccgtctcctgccattgatcctataatctagtcccccgcacgtgaatatatacatcagtgaaaccaaactcttttccaacccgcaactaagcggtatttttttttacgtagtgggattatacacttgaacagtaccaaggactatatttgttagcctctaatgcaccagcagtgtccagcacattgcaatttactggagtccgaagacgaataaactctgggcaacgcattgatgcgcttatacggcgaggggtttggtcatgaattttgcttgttggtcgctgagtatatgaaggggtgggaatggccatttgggccttgctgttgaaggtgttgatgctttcagatagaactatttgagactatgctatgaaatgtcgttcgggatatcagaactttctggacttaatatatggttcatcctctacatcgacaatattaagatagtaggaataataagcattgagattatatgttactctgatttcaaattcaaggtagtccgtgatggcacttcagccgtctacattagtactccgtttacttgttccaagtgattagtatagctacgacggcaccgtaactctgtatccggtatattggtttatactctggcatacagtaataatctgtactctcggtacagtttcatggcatggattttgagataaagaataattactgaccagaaagtatatgtgcgggggatttgattctgcttagagcttctgcagctatctcattctatatacagttttagggtcttctatgtccggaaagagcacgaccacaattcagtgaccatttcttcctttcccataccatagtacaatgacaaattgaatgtttcggcattaaaagtgatctgattaaccgccgttgtgcttaagttagtagacggggccggaggctagagggacgggccctaagtaccctaaagttctagccatgtagcctcaactagcgctagtttatatagcgaggtacgggcctgatttaagcaggtgcaaatcgttccccacgtgcgtggtggagacactggaaaggagacttcagtcccttgaatataatgggcctcatgataactcacctgacaagttacatccatatgtacatagatagttaggaagtagtggtccacactgcgtgtacaatgtaagcactaaggagactggcggcgctgaagctaaggctattgatgccagtgggcctagcatagttcccggttggagtacgggtcttgtaagctgaggcatctcgtagtctcgtagtatttatctcgtcctcgttcaccactccccaagcttagatccgagaaatataaccatcgcaagcattatagacacgactcctacttaaccctgctactgcctttcaatcctattgaacatgttattctggatcagcacattcgcaaatatcctcatagcactgaaggctgccagtaaatgtcccttcagctcgccattccccctgggaggacttctatagccagttcaaaaagcagtctgtgtcagtacgctgtagatggtgattgctcaacccaaggtgccagcgaagtcatacacgaagatatcagggccaaccgtatgtcaatctggctgaacaaccccgtctacatttcagaaaccaagatcgactatgcctacccagcgaaccggcatagccattcatgcgacctccacatggtcacccacttccggcattaaacctaacgtagtatgaaatgtgcttacggagtaaagtcttctcacaatcaatagcttcaatctctcagtcactcacccgcacccccgcaactgtaatacttgtcgaaccttaaatttgacaagtagattccggagatccagccctgccatgctcgccacctaccgaaaaggcttctggggtctggtcttcctgacccgcggcctccgaaaatgggatccgcggacgcgagacccctaccccccaaaggaaagattgcggaagaaagtgtttgattacgcgatgctgtctcttcttccggtttccagtcatggtaacatctacgaggtatcaacagccgtcagcctcgaccagacgtgccacttggaattggcgggagaatcttctggtatggctctagcctctagataagtgatcaaacttaggccatccgctcggagtttgatataacaaacatcaatttgttaaaacttaacctagtaaagacctcaaggacttgtttcacaagtgagattctctgacaggtctagggtgaagaacttgtttagggttgttctccatgaggccctattaaggcaggaggagtcagatttctgtctcgactgatgggattgtcactccagtccttagatagatagataagcgactgcttgtcggacttgagactgcacccgatgagtatctcatagagttctatctaacagggcctgaataggttaattttcggtttttcttgcagatacactgatcttctatagttactgttaacagcagattgacttgtatcatcggacactactccggagtactgtccacctggagagaacagtaacgaacttatattaggttgaggcctggacctggctgagtgaatcattatttgaaatgtatatacagttatttttaatttctagaaatgccacatggtggagtatgtcaagagagtacttgtcataggaggtttcggagatttggagcagacgcccaatggagaactccttgcgaggttccgtcgatcgcaatgccgatccttacctaaacagaataacaaccatgagctaaaacgcagtggggaagaagtcattggtgttgatattccgtagctgtaaacacttggtcctcaccctgaccactagtttgagaataagccgaggaaatattagacggtcttaataaaattcactgtcagttctcagcttggtataggagttcgttctcgaatgatgaatggtgcgggtccattcgtccgacccaactttatggtccaaggggaggaggaataccgcggttcaactgtcgctgccgatgaggggaaaaggatcatgtgggttgcttatgtgactctcttatgtattttcgattagtctatcatctccgtagtcaaaagtaagaatggtttatatatgaatttcaaattcccccttggctgtctctaataatagttttatcgtctctcctttacgctacgtgaagctctcagggcaagcgataacacctgatcagctcatactactagtaggggtgctccgtctccgcatcaattctccgacgccactccccatcctctccattccgaccaacgactgtcaccatggtcgcttcgaacatcccccctctcgagttcactcctgtcgaggatattccgggtcgcgtgtctaccttacgcaagactttcctggaacacaagactcgcgaccttgaatttcgactggtccagctccggaagctctactgggcgtgagtttttttagcttggcaaagagctgcacaatgcatagattgactgatatttatttgtttgcttttccagtgtcaaggatcatgaacaagagatcgccgatgcttcagctttagacttgggtaaacctcgtttcgaaaccgaggtcgctgagagtggatggctacagaatgacctcgtgttcgtgactcgaaacttgcacaagtgggccaaggatgaaaaagctgaagatattgacttaaccttcaagtttatgaatcctaagattcggaaggatcctctgggttgtgttctggttattgggtgagttcaacccccgccccctttaatccgatccccaatgaaacgtcttggactctttcgcttgcggaagcatactaatagaatatttcaacagcgctttcaactatcccttccaattgacactcggtccggtcatcggcgctatcgcagctggtaatactgttgtgattaaacctagtgagaatgcgcccaactctgcggttgttatccagcgaatcatcgaagcagctctcgatccgtcctgctatactgttattcaaggaggtatcccggagacccaagctttgctcgctgagcgatgggataagatcttcttcactggtggcgccaccgtcggtcgtatcatcgccaaggcagctgctccccatttgacccccgtcgtgctggagctgggtggcatcaacccggccatcataactaagagcgccaacccgagactcgttgcgcggagacttctgtggggtaaattgatgaattctggacaaatctgtacctctcagaactacctgctggttgacaaagaccttgtgcctgccgtgattgaagaattcaagaaagcttataatgaattctatccccagggtgccaaggcatcaccagactattctcgcatcatcaatgaaggtgcattccgtcgcatcaagtcaatgctcgacaataccaagggcaagatcttgatgggaggtacaatggacgaaaaggagcgcttcattgagccaaccttggtactggtggactcagttgatgattcgatgctgacgcaggagagcttcggacctttgattcctatcttgcccgtggacaacctcgagcaggcagtcgacattgccaatggaattcaggccactcctctgggtctttacccgttcggctctaaggcagatacagaaaagagtatgttccccgcacgttttgatccccattattgcttgaaaaaggccgtattagatcgtctgacgctttccaagttctttcttctactcgctctggtggtgtctccgtcaacgacgctgctttgcacattcccaccctaccattcggtggtgtcggtgaaagtggtcacggcgcctaccgtggcaaggccagcttcgacgtcttcgttcaccgtcgtcccattactagcacacctagttggctcgaatccatcctctcaatccgctacccaccatatgcgggtaagctgagcaagttcaaggcagccaacacccttgcacccgatttcgatcgtaacggaaacaagatccgattcggctggctgcgttacatcctaactctcggcggaggctctgcgaaggctggtgctggcagagccgtcgttgtcgctgctggtaagtgattattttcgtctcgttcgtcgaaacactcgatagatttgcctgcccctcttcggcctctctcatataaccccatatcgaccttgaaacgtccgaattcttactgtccgtacctctccagacagagaataaacacgcccgataccctaacttccctttctgtgtcttttgggagggcttattaatcgccgctttcctttcattccttcccaccatttcttttggctcaatttccttgatatattattttgcttctaagataccattttgttcattctgcacccaattactccattgatctaataccctatttatgatgaacttgctcacaattcgtttttggttagtggcctatctcgtgcttcaggttcttgaacgccgcgcttcgaagctttaatatgacctaatattttcgattcggatatataatatttttggttcggtagcgttgctatattgttgaaagtgtattgttgtacaaacgagatatatgaaaaatcttccagctagctggctaggtagagttaacctacgactcaactgctttcgctttcatcacgggtttggttctatgtattctatttgaacgtatgtcaagtatcattattcgtatcatgcgaatgatgaatgcttatcatctatatcagatccttgctagattgtcatccatgtagccaaagagcagcaacgagaagggtaaaaaacatcaaagtataagaataagaataatatatctcaacatcttctctcaactccttttcgactgacacataaatacttcactcccttgtagggcttcacagtctcgcccaagccacggcttcgtcgcgggtcgatgttcagactgtccaccttgattcctgagggtagccagcctctgactgagaatgacaccgcggcagaattaggcatgagagttgcgttcaactgggctttggttttgcgttgtgtagtatggaagattgagcgggaggcgtcgtctgttggaggttgttgtgcttgtggttgaggtgaaagggagggctgaggaggtgtcggagattgcggttgcgatggctcttggggtatctcctcctgttggtctgcatctggtatggcgggggcggcgcgagaagacttcttgaccttcttcttcttctttttcttcgttttccgctttgttgtcccttcttcgggggcttggtaggatgttgagggttcggggtcgtagtagccctggaggagatttgcttccggatcgacttcttcggcttcgtcatcaaagtcatcgtcgccagttgaatgtccggccacggtgcaacggagggttgcggtgcccgagacggttccagcgtctttggtcgggactcgccattcaaggacattgttaccgggggagaagagcgcatcaccgcggctggcttgcatgtctgtgatattacggactgatttcggaatgggtatcgtgaccaaaacatcttctaagacaggacccgaggagttcccgcctcctccaagaaacgacggtgtcgacgtaccggaaccatttcgtcctccaggccggtttgaagacgaatatcccgggaaatttgtgttgaggatcaagcggacttcgaaatcggagccagatgagccgagagatttacgaatgtctacaattgcgggcagaaagagcttctccatatgacttggaggctgatcgagactgggatctattggtagaaggtctacctcataccctgcaagaataaaccgcccgtctgggggcacaaagctcagctcccctggtcgctctctccattttgccagtcgtacacagggatgaaaaacgggtaactcgagcttgcgtccaatggcttgctgaccaccaggagccgtcaaggaaagcagtaattcaggaacaccggatattttggctgtgaaggcgatggtgccggacactaaggcagagagtaatcgccctgaaggcgccatcgtgaccgagagtgattcgataatatcaacatatagctcgttggaagtgtgccgcaccccagatcttctccatggtatcgcaggtccttgagtcgccgcattggctgagattgaccgcttgagcgtattcgaaggccccaagataggtgtagaggatcttcggaggcaatcatattagtagccaaatattggtggttctaaccggcaattgtatatagaaccaaagaagactggtaatgtgagactcacccagacaagccgacattacctagtaacttccccatccaccccggcatctcaacggcctcctgtagcgaatttagctccgtattgcatacgacacctgcatcgcacatctcattgagtaactgtgcaaccacttcatagtttgcctgtatcttgtgtgaaatcaacggtgctccgacgaattcctcaagtacatccactacacgatgtaggaactctagcgcaacgagtggctccgtatcaacttcggaaagcgccaaaaaaagcaagtttgactgaacaattgaaaaaacggttacggggggcgtagcattagggatataaagaagcgacggccgcggagctggatgcgcgaggtagaggggtagaatagtagctgcggagggcggacgggagcgatagacctgctctacgagaggattactgtggatcgatgtcagttattgtagaacgcatgttaaagcacatcggaagataagcttacttatgctcatcgtagatatagagcgcatcaatctccccgctcatcatgccgatctgtttggttcctttatcggtggggagaagcaacgacatcgggctgcgctcatgacatctttaaattgtccccgtgttctgccgttgattgccgcctttttttgtatcgatgcgattcctctcgctgaaattcaaggcagttctttgctgtcgagtcactgatcaactgtgctttcttgcccagtgatacagttttacgattcccgagaaactcgataatacctacagtactactccggtgcaactagcgcccaaccaaccaacccattccaatgtcttcaacttcggagaataacggccgcgcctgggacgtcgagtccaaagaggctaaacgcctactggcagaagaccaatatgacgactgtacagcttgcagagtcacaggttagtttcctacagcttcctcatatatatctatataagtataaatgatctagtggactgtcgtctgacacatacacaatgtaattaggttccgccgcatttattggtctcggtgtctacagctattatacggggatgagcaatctgcagaagcaagagcgcacggtcatgcaaagcgctacgaaatataaaatgggctcgcggaggctaggcattgcggctatctccgcaacactggtgggaatgggtatttacagggcttttaattaaataatacagtagccttgatacaagattgtgccctgtttgacatccagttatgcttgtattagaactgactgagaacaaaaataatcgcctaagcgtcgtcatatatgcatgtagaacaaatgaaggaaaggagaagaacaaaatgagaagaattacacgaaacaagtatcacaagagctgccccaccgggtatcaccagatctgataacctctatatgtttaaccgttatagaaaacaggaaagcaatgaagacaaaaggctggaaaacgaagacaacaaggggtggccaaaagaggaccacatgcgagactccctccaaatgcaccgtgaactcaaaattcaatcaaaccgctgcgttaccataagaatatgaggttcgtccaatcgtcgatactatattctctaggtgaaacggccgcgtttgccgcccccaaatatatccctatttcctaaccccgatatgtcgaaaaaatcaggaactgcaaactttcgttttgagcccgcgccgacggaaggttcccgtgtggatgctcgagggttggtccgtgaaaagttgttgtgccgggcttgttgtcgtgaggtccgaggcagaacagatacactcacaggtgaactatcttgagatgaggcagtcgagctgtcggaggattgcatatctacatcaggttcttgacatggaggaaatgaaggcccagcagtgaaagtaaagactgccggtttatcaagggtgtttgcctcggtgacttgagagttggaaagtggggtctgttgctgcgtagcaacggactcatcagtcgaggtcgacttgggtggctgtcgagcgccttctggcttggtttgttcctttcgtgtagcaacggggctagtgcttcgaggttgcttctcaggctcgtcatcgtcgctcggagtcccggttccatcactcctttcagctgcccattgtcggattttcgatccttctccaccagcaaggccgaggccttctttgtctagaaaatgcagtaggtcctcaattgcttcctggtagccagcttgtttcgcctgtgattgctcgtagactgcatttttataaagattggtaacggatagcgcggccgctttgaacgattgtaaaagttgctcaggaggttgagggcgaggagtcgagctagggagcgatgtgttcaatgacctcatagagtccatggtagatcgtgctgcagatcaagcagctgtgctaatatctctccttaacttcaaaacaatatgcggttggcgccactaggaggggcgaggtgaaccgtgctccctgaaaagatgccaacaaatatcgtactgagacagaaacaaagaaaaggaaaacaaaaccaattaaaaccaagttccaggtcgcaccccacggaaaattgggaaatgtagtgaaaaggattaggttgaaaggaagcaaggaaacctggtgacgaagatcagtaatgatacttgtgcaggtgatctttctttgcttttgtcccggtaacgtgacccacagcggggaaacttgtcttccgccggttgatgactcatatgtgactaagcatgaccctcgcgtcccctgtccaataagcgcgtaggacggccgcgcttccccgatgaaattccatttgccatcccggcgcgacggacgactacttctttcatcaacctttattattcaatttccgctccttgttgcatacagggaatcaatccctccataaacccttatccactccagccgatttcataacggtgggcaatcaacatcttagtgcctccacccagtttacctcctgtcgtggtttcggagcgcttgcaaggcgtgttcggctctatatacataacacacgttatctgcgctgagtgcgcccagaacgaagatggcgccttcgctcgcccccaattcggaaacaccttctcaagcagatactcctatgacagatgcaaatgatgaacctgtcacgtcagtacccgtagatgacgcgcaaatgggggtaggtgacagaacccggtcaaatcacttccgcacaagttctggcttgcgcgcattgatgagtgatgcatattaggggacttgagtttatgctgactttctttccaaacagggctaccatgacactccagactatacggtacattctacgcgatttaccagcacttcccatcacacaggctaacccgcgcaaaccaggattcggatacaaaccctaacaccacagcaagcagtgttgcaggcgacacagttcctgtcgatggccgaaggaagcgatctgaggcatttcatttaaggaagagcatcctaggtaaaaagcatggtcgtctggacgagtcaaaggtatagtagcccacctgttatctcactttgtcgcggctggagttgcttattaacagtctgttacaggaagatgattcgattcggagattccgctacctcctcgggcttaccgacttgtttcgccatttcattgaaaccaaccccaacccacggatcaaagaaataatggccgagatagaccggcaaaatgatgaggacgaggcaaaagccaagaaaaagggttcgtcacgctcagggggtgcaggtggtgatagacgtcgcaggacggaacaagaggaagacgcagagctattgaaggatgaaaagagtggcggcgagaccggcaccgtcttccgtgaatccccgccattcgttcatggagaaatgcgtgattatcaaattgccggattgaactggcttgtgtctctacatgagaatggtatctctggtatccttgccgatgaaatgggtctaggcaaaacccttcaaaccatttctttcctcggttacctcagacatgtctgcgatattacaggacctcacctggttgccgtgccgaaatccacactcgacaattggaagcgcgaattccacaaatggacacccgacgttaatgttcttgttcttcagggagacaaggaggagcgccataagttaataaacgaaagactccttgatgaggatttcgatgtgtgcatcacaagttacgaaatggttcttcgggagaagtctcaccttaagaagttcgcttgggagtacatcatcatcgatgaggcccatagaatcaaaaacgaagagtcatcactcgcacagatcatccgtgtgttccattctcggaatcggctgctgattaccggtacccctctccaaaacaacctccatgaactttgggcccttctaaacttccttttgccggatgttttcggtgattcggaggcattcgatcaatggttttcaaaccaagaatctgaccaggacaccgttgtccagcaacttcaccgagtactacgacccttcctactccgtcgtgttaagagcgacgtagagaagagcttgcttcccaagaaggaggtcaatctatatgtacccatgtcagaaatgcaggtgaagtggtaccagaagattcttgagaaggatatcgacgctgtcaacggtgctgctggaaagcgcgaatctaagacccgtcttttgaacattgtcatgcaacttcgcaaatgttgtaatcacccatacctgtttgaaggagctgagccaggtcctccttatacaacagatgagcaccttgtgtacaacgccggcaagatgtcaatcttagacaagctcttggcacgtatgcagaaacagggaagccgcgttcttatcttctcccaaatgagtcgtgtgctcgatattttggaagattactgtgtttttagagagtacaattattgccgtatcgatggcacgacagctcatgaggatagaatcgccgcaattgacgagtacaacaagccaggatcggataagtttgtcttcttgcttacgactagggcaggaggtctcggtattaacttgacgactgcggatatcgttgtcctctacgacagtgattggaaccctcaggctgatctacaggccatggaccgtgctcatcgtattggtcagacgaagcaagtggttgtattcagatttgtcacagagaatgcgattgaggagaaggtcttggaacgtgcagcccagaagctgcggctagaccagcttgttattcaacaaggccgtgctcaacaacagaccaagaacgccgcgtcaaaggaggaactgcttggcatgattcagcacggagctgcgaatgttttcagcaatgataactcgactgcacctttcaatgccgacaaacaaatttctgatgacgatattgatgcgattttacgcaagggtgaggagcgaactgcagaattgagcaagaagtatgagaaactgggtatcgatgatttgcaaaagtttagctccgagagtgcatatgaatggaacggaaaggacttcacagatcgcaagaaggacatcggcctcaattggatcaatcccgcaaaacgcgaacggaaagagcagttctactctattgacaagtactatcgccaagcgctagctactggtggaagaacggccgatcccaaaccgaaggtccctcgggcacctaagcaaattgctgttcatgactggcagttcttccctccgggactccaagaactccaggagaaagagaccgcctacttccacaaagagatcggctataaggtcccgctccctgatgggcctgaagaggaacttagtgagcgtgaagccgagcgcgatctggagcaacaagaaattgacaatgcggtgccattgacggaagaagagcaggcgcagaaggctgagatgtcagaagaaggcttttcgacctggaatcgccgtgatttccagcagtttgtcaatggctctgccaaattcgggcgcactgattatgttgggatcgccactgaagtggacagcaaggaaccagatgaagttgaagaatacgccaaagtgttttggaaacggtacaccgagatccaagactaccctaaatatctccgcgttattgagcagggagaggagaagctacgcaagatgaaccatcagcgtaaaatgcttcgcaagaagatggagatgtaccgcgttcctcttcagcaactcaagatcaactacacggtgtctaccaccaataagaaggtgtataccgaagaagaggatcgatttttactggtgatgctcgataagtatggagtcgatggtgagggactgtacgagaaaatccgcgacgaaattcgcgagtccccactcttccggttcgactggttcttccttagccgaacacccgtggaaatcggacgccgttgtactacattattgaatactgttgcaaaggagtttgaggttgcggatgagaaagccaatggcgagtctggcaagggccgtggacgtgatcgagacgacgaggatgctgaaaatgacgatgatggagcacctgctaaaaagaagaataagggcggcgcagtggtaattttggtcctgttaaactctcgagggtactcaactgacgtgtatggtctcatagaacaagcaggtcaaggctgttaaaggcaacagcaaagccaattctacgtcgacgtcgcgggcagctagtgtctcatccaacacagcatcaaaggcgaaaagtcggaagaagtaatccttacagtgctcgatagttgttaaacagctaaatattgttatgaccgttctgcagtgcttgggaaggtaattggccatgcgaggggtttggttcttttttcgatataagtcggtctggcgttggcccatagatgccattgttcatgatgtcgcttcacggttcttgtcatatctttctctgtaacacaatagctatctatctgtacctgtgcggtacggtatttgaaatgtatacaaaaagcaatagaatacttcctaatgtggagtttccatcagcttctgtcttgaccgtggaatatcctcaggcagccatggatcatatgacagggaatcgggatcaaatcactttcaagttggcaatgatgacacttgccttgcttgattcgccatacaacatgtgacgttgccactgaaatattaacatgctatctatcttacgcagcttctaatttattctgacccctcaatgttgccgtgtgttgaatctcattggaccgacggtcgctcactgtaactgtagatcatccttagcgtgcaaggtatgcgcccagaataagatccgcagacaagttaatagtggggaccctgacactgggacagaagcgatggctatcttgaaacttattgtcattccgtcatcgtctttggtataaatctactcccgagttcgcctgaacggacgaaaacgcaactactagtagtatcatcatggcatctaagatcttccttattgagaatccaaactactgcaaatcagggatcaagtcctatgtgcatctaatacgcaaataccgcttgcaccccaccaaaaatggtccctattccatcggtcgagctatccatcagactggccggcccttcactgacaagcctatcggcggtcgagttcgttttcacgacgtgatgcgaaaacaaacctcggacgatcaactccagcaagttgagaaggatgatatccaaaacgatgcagcgttctttatgcccgtgagcatcggaaccccggctcaaactttcaacctagttttggatacagcgtctgttgatttttgggtaagatatatctatatcgttcaagatatgagaaagacaaaatccaccgtactaaccctagcaggtgcgatctagtgagctccctgcagatacactacccaagggtgaagaggagagccatacctttgatcctgaaaaatcgagcacattcaaaaacatcgaagattcgccatggaaggttacctacgtggacggttcttcagtgtctggttccatcggtacagaagacatcaccattggaggagtggccttcaagacacaacccgtacagcttgccaaaaccatgtcaccaatgtttacacaattctcagcagatggcgttctggggctggcgtttgggcatattaatcatccccaacaggacatcaaggccctggccgagcgcttgaatactagagacgaccgagaacaatctgcaaaactgtttactgcaaaacttggatcttggggcgactctgacctaaagaagtcattttgcacatttggctccattgatgaggatgctgtgcgttattgtggccatgatgttcatcatacgcctatcgacaatagtcgaggctattggatgtttgagtccccctctgcaacggttggaggaaaacccatgagtagatctgagaacaaggctgttgtggataccgacgcagcattgactctacttgatgaccaaacgtgtcaagccatttatgattctatcccaggcgcattctatgacagtgaaacccaaggctttctcatcccatccgacatcaatgtagaccagcttccagtcgtccagttagcagttggggagaaatcgttcgctatgtcaaaggagagtttgatgtttgctgaagccaaacctggctacatatatggcggtgtccagagtcgtggatcgctcgaatttgacgtccttggtggaacattcttggatggattatatgcggtaagttgcatgctccaaacacccctcgaaggctcttttaacagaacaaatggtatagatatttgatttcggttctcttcgatttggtgctgtgcaggccaaaacaaaagtgtagaataagagtcgagcccaagtattgttattatgatgtgaacgtttcctcgatgaatgttgtgtatggagatgatgagtttgtccatagggtctaattatgctattgtacaagaggtatatttacaagctgtcattattatccttctgattcaagttcaccgagtttttttgggaggcacatcggccaccgcaagtggtactcgtagaaacatttccatcagcagcgctgctgccacactgacattaaggctgtccactctagaagggtcggactcgacaccgaggggcgtagcaagtctggctccagggatgctcacgatagagtccgcatgagacttaatatgacgactcaatcctgatccctcgctccccatcatgataacgcaaggcgattgagtactaacatgttccccttcggtcgtacctttaccctcgacaatagaagcagtgtccacgtatttggaagctggacctggggcatctgccgcgtagaatttccatccgttggctttcgagcgctggatgaaatctacttcgttactcacttcgagaagagtcatattttcagctgctccagccgaggccttgattgtcacgggagataaaggcgccgagtttcgaccagcgaatataatagcatcgacaccaagataatatgcggagcgaatgatggcgcccaggtttccaggatccacgattccatcgagtaataatacaacagggtaccttgttctctggtcccaatgatggattttgagcttgtcgttcgtgctattcaccaatgcttcctctcgtgattgagcgcccagttccacaccgaaatcctcctcttttatagatggaacacttttcaaacccctcacgggtaatcttggcagaggggacgcttcaaggacgcagccattatgaggtcgaccggcgctcatcttatcaagaagccggtcccatccgccgaatgccatcttgactttgacgttcttcgaaagcgccaatttgcgtagtgcaaccttggcagagcttagttcctcaccagaggcctgatacacatacaatttgtacatgtgacgtctgctacagcgtagtgcagcctccactgcgctggttccatagatgaattctgatgccggtgttgtgtatgggattgcatcagggacttgcacgttttcttttacccgctctggtactctctctgtggcacggtggtgtttcgttggttctgctcgacgagaatgacgcttgtcttgaggtctattgctatcctcacggccattgtatcccctggcttcattattcgtgaacctcttactgctctgaaagcgttggtgttcacgaggcagtgcgcggaaatttcctgtcctgataaattcatcttcgtcaaagtcatcatcgagccactttctgccttggctttttttttcggttttatttgatcttgtgtccctgctttctttatatgaccgttcaaagtcagaatcgtatgaacttcgcgacgaagatggactgtcgaagccccgggtcttgcggataccacgaccaatggccgagttaagtgaagcacgtctcacatgattcaggtggatagacggagctatagataagcgcatatacaaatgcaagggcttcattaacgaacgatgagacattgcagacaatcagagaaacaaataatagtgataataggactctataagtaaagctatcgctgtcgaaaccatgataacttcgcaaatccgctgttttcttttttttttcccacgggagcttgctgaaggtccgataagataagcggataatctttgatccgaggggtcacgcgtcgcgtttagatgcaatattacgcagttaggaaatttgatgaatccttcgataaacagttgtactagcgactggttcgctcattcaattctgctcccttatggaggatattcatgagtccgcttctttcttgtaattttctcattggtgttctttcatttatatttcaattgccaacgacctcaaatttgaagtacccttcctctcccttatcggtgtccctgctatcgtgaatttgtatgagagaaccacaagatacgaaatattcaagatggatgaagaaattgcatctcgattgaacgaggatcttgtcgcagacctcctgtcacaatttcagcgcgagtctcatgcccatatacctgaaggctcaccagaaccgaccaaatcacagctggcggtagaaactccgacgatttctaatagtgatgaatatgacttcctccccggacattttgatgtccgctgtgtcataagtgaagcaatagagactgcgaaggagccatcctatttagtgaaattgcgcagtggagaaactgaaacggtaagtactatgtttctctcacgtaacctttacttgacctctatcttactgatatctgcttccatatagatgtcatcctcccgacttgagagcctaagcaacggacccgaagccctcacacgtttccaaaatacagaacaagtctacggaagctcacagttcccatccagcatggcttcctcatccaatgaagagggatatacttcgtctgagtcaggggcaaggcgacgctccactcgagcgaggaatactcagttcacggatttctttcgccgtatgagcagtgaggacgaggaatctcgctctggatctccttcgagtgatgatgttattatatcgtctacggcaactacccggaagagacgtttaaggagacgcaaacaagccaagatacactcaggaggctcagatatggaaagcggctattccccaagacctacaggctctcggttttcaacccggcagcgaaagacgcttcggaaaaatctcagggagcggtatgaagaggacatttctgagtttgaagacgccaccaagacacagaagttcttcggggcgaaggaatcattccgcaagatcccatctgatgacccgttccgaagtcttcacaatgaaatgtgcgcagtttgctaccgcagtggagatgactatgcgaaaggccctcttgtcttctgtcagggatgtacaaccgcttatcatcaagcttgtctaggtcctcgagctacacgcgaacaccttgtaactaaggtctcggatgacttatttgttcttcagtgtcgtcgctgcctaggtgttgcccatacgaaagaccaggtctgcccacaccaaggccgctgtactgcgtgttctaagaaagggaatatgtctaagccacttcgggagcgcttgacgccaaagcaggagcagcagcttcgacaggagaatggtggtaaagatcctatcacccatgtggatatggcctgcttgaacaatacagccaacttactctttcgctgtactgaatgtcatagagcgtttcattttgatcatgtcactacagatcatacaacaacaactcgttgcggagactgttcatcggcccctggagagatcggtgcaatagttgcctggcggccaacagaccttaagacatacgttgctgggtacagcgcaaatatcatggaggaggttgacaaagagtacctaataaaatggaagactatgtcttataatcatactacctggatgcctggcagctgggtttggagcgttgtgagcccggccatgcgacgagcttttttcagatcgaacagaaacttgaacccagatatgacaactgaagaggcaataccggaagacttccttcgagctgacattatcttcgatgtccagtacgcagatgacgagaatgacgacagctcagaggatcgatctatcgaaacagatatatcacgagttgacaaggtgtccaaagcctacataaagttcaagggcctgacatatgaggatgcagtatgggactctccacctgaccgtaacaatgctgagaggtgggccgatttcaaaactgcatacgaggactgggtgaaacgtgactacactcatatgccaaatcaacactctctcagaaagcatctggagcaggtcagaaagcaaaattttaagaaaagtatagtcaaagacacacaacctgaaaccatgacagggggacaactgatggactatcaaaaagatggtttgaattggctgtattacatgtggttcaaacagcagaacgccattcttgccgatgagatgggtctagggaagaccattcaagtgattggcctgtttgcgactctgatacagtatcacaaatgctggccattccttgttgtggtaccaaactcgacgtgtccaaactggcgaaaggaaataaaggcatgggttccttctattcgggtggtcacatactatggatcctcgttttcgcgtcaactagcgcagaaatatgagatgtttaatgggggcagccatgacctaaggtgccatgtagttgtgacttcctatgaaaccatggctgatgatgcctctcgaagagtcctcgccaaattaccctgggctggcttggtcgtcgatgagggccaacgtttgaaaaatgacaagagccagttatatgagtcgctgtctcggattcacttccctttcaaacttctattgacgggtacacctctgcaaaacaacaccagggaattgttcaaccttctccaattctgcgacccaaccaagaatgcagaggaactggaggaagagtatggaatactatcaaaagagaatattcctgaactacacaacatgatccgaccattttttctacgccggacaaaagctcaggtgctcacttttcttccaccggttgtccagatcattgttccagtttcgatgtccgttgtccagaagaagttgtataagtccatcctggcgaagaacccacagttgatcaaggccatcttccagcgaaagaatgacaaccagggccccaaacaagcggaacgccaaaacctgaacaatatcttgatgcagcttcggaaatgcttgtgccatccatttatttatagtacagctattgaggagcggacaaacaatgctacagcatctcacaagcatctggtagaggcggctggaaaactccaactcttacaattgatgctgccaaagctcagagagcgcggacatagagttttgatcttcagtcaattccttgacaatttggatatagttgaagattttcttgatgggctggggcttttgcattgccgccttgatggaagaatgtcatctttggagaagcagaaaatgattgatcagtacaatgctcaagactcgccgtacttcgcatttttgctttccactagatctggaggtgtgggcatcaatcttgccactgcagataccgtcatcatcatggaccctgatttcaaccctcaccaggacatgcaagcattgtcccgtgctcatcgcataggacaaaagaacaaggtgcttgtgttccaactgatgacccggggcagcgctgaagagaagatcatgcagattggcaagaagaagatggtgctagatcatgtactgattgaccgaatggtctcagaagaagacgacgggcaggacctggagtctatccttcgacacggagctcaagcgctatttgaagacgatgactcgggggatatacggtatgattctgcgtctgtcgataagcttcttgaccgcagtcaagctgaacaggcctcctcttccaatgaggacgcccctgaatcgcagtttagcttcgctcgagtctgggcgaatgacaaccagaatttaagcgaactacaagacacagaagatcctacatcagagaatagtgctatctgggagaagatcctcaaggagcgagaagaggcggcagctgaagaagccagaaaagctgaaaactttgggcgtggaaagagaaagcgggtgacagttgactattcaaatactgctactacggaactatcccctacgaaaacgccccgtaaacgagatgctgaaagcgataccgaattcaaaggagatgaaattgtggaatctgagtctgacacttctcccgagcttgatttcgaaggaatagaacgcccggcaaagagaacgaaagtacgcgcattcgaacgagtcaaccccatatccgaccacgacctctcgatgagcgcagcaggcatggacggccccacggagacccggccctcgtgcttcgcctgcaatcagaatcacccggtcggctcttgtcgtttgaaactagccggcgtggagcattgcggcctctgcggtcttgcgcattttgggatctcccgcacctgtcctcatttacaatcagacgctcatgtggccaggatgctgaacgccctgaaggaaagtaccgaggaccctgaactcgtccttcaagctaagaaatatttgaccggtattcgcggtgaccttgcacagcgtaaaagaaaacaggccagtaaggctacaggtagtctcacggcaactcatggtacacctgatggtgcgactcccaccgctgttaacaccactgccacaaaaccgtcagtagtcaacttgacagacaatgcacggtttgctaaaccggcgacacagtcggggacggatccccggttccttcagtcctacaacccgaggttctgaaagtcaggaagcaaggctttcatggctcgagtacgtacgtaatgacgaatggcgagaggggatgaacataagatgggacttttgtctgtaaatacgtggaacacacattttctaaccgatcttgcttacctccttgtctttattttgttttcttctctttcttgtccttagcgatttttcaggttcatactggcgctcatatcatcattatacatttagagggagagaatgatcgtcgccatgttggcaaggcgagagatgtacaatacatagtaatctcatacaccttcgggaacaattgttgcacgaaacgactcactacaaggattaaaggtccaaaggacaattccaatggcagatttggggatggtggtcacatgtcgtgggttgctcagttattggttgacccccaagtcttcaacatgtcaactatgcgtccatgtggacaaaagccacaccacttctacttacaaaattaaaggacgacgcagtccgtttgatcttcgttcaccttcgtcgaatcggcgccggcacaaggtatatgtcgtttgaaaggtgtatacgctcgtcgtattccacgatgccacgaaccaccgatcccggggacacgatctgtataaggatcagtatttggaatacggatgaaacagtgaggatggtggattagcatcagtaccagaacatatgcttaccctcgatgtgactttcagggaccggtccgagagctgctctacaagacaagttataattccagggtaatctccctggagaaaagagccagagaagtggcaaaatcatgggaaagaaaagaagaaaagagagagcaggatcagcaggagattaagcatccccgaaaacactgtagggtgtttcctgcaagacgcgggaaacgagcaatgagaagttgtgcctcagaagctgcagccatccgtgcagatggttgtactgaccaacattatcggacaaacactggcggcattgggctctagtccacttttcttatacacttggggcgtttcctcttttgttctttgcccttttgaaactttgtgtgtgaatttctttttcgccattctctgcttccttgctttgttatactcggaggctctttagattgcattcttatattgtttttctctactctcattcatgtctttgcattgctttctctcttccaaatagttattatgctcatatatagcagctgattagattcatttttattttcctctcttgtcctttatgctatttggctctggagatccctcggtgtcggtgctgtcaaccagtgaatgtcaacaaatcttttacgcacgacgacatcgtctggaaattcactgaatcacgaatctccctttctgttcctctttctcgcttttgttcttctccaactccttgtaaaaattctgtttctcttgttcaccctatttagtctcaactcattactcacttccttcccttccatgacggtatactccagcgtcgcgccatagatcactttatctcatcgctctcttatatctaacgtccaaaacagcattacagcaggacttgaggtgattcgaggcctgagcgaaccatcatgtcatctccacttcgcccccagttcttctgtgcccgtccaaatggcacgatcacccccctggttgctgttgatgagcttccctcccatatatcgattcgaggagtccctcgtacactgtccgccaacgaaacccagggcatgactagcttaggcaccgtgagtccaagagcgcaaacctacgtcatcgatggcctggtgtcagcgtcgacccgcgcgtcttccggtcctcgttcccgtgactttgacctacaggcctctctcatgagactcgtctctgatgaaaatgttccggcaaaccagcgcctggccgtgaatgccctccttcagcaaggtatttcccagaactggttcatgtccaacgcctcgaccactagctggttggttcctagcagcagtggtggcacaggtagcggaagttcgaggcaggtaagtgctacccaacatgtaacctgacgaggacttgcgccagtaaaaatacagcaccagctaatgtcctattagggcgctcatcacaactcaaagaaagaattttgttcgtactggatccgccatggcgaatgcgattatcagcagcaaggtaaagggcacataggaagtagcgcggtttacaaaggcataaaatcagctaatatatccttcaggttgtctctataagcacgagatgcccaatgacctccccaccttagaaaagcttggccttcgggatattccacgttggtaccgcgaaaaatacggcattcccagcctcctgcccaatggacatggtcacccacgttctcacgctagtcatggtcaacactggaaggatgatactgtggagcgtggcgctatgaagtcgatccagtatccttcccgcctggagatcaatggcgcgatcgattcctcggatatcgaaaaggcttctaagcagaagggtactcattatctttcttctcaacaacatgctacaggggctaccggaccatctcgacatgcttatcaggctgtgagctcgcccaagatctcaaccaaccctaagcatacacacaagcatatctccggtgcggttaactcagtgcccagaaggatggatctcctgtcttttgattccctcctagaatatccaaccctggatcatatgggaggaggtatgagtggtctgccttaccctagtcctaccgatcatgccgccatcgagaacgttgatagggttaagcacgaagagtttgttcgcaatcttcactctcttatgccagctcctatcgccacgagtgccgactacctgtcaacttcctttgaaggtgccccgacccagccacgctctaagaaaagccaaaagtcgcgccgtctctaccagccccggtcccaaatggctatgcacgatataagcatggaaaagggcgaaattgactccttcggtacctatcatagtcatgaaactgcgtcccccagtgcggtttcggtcatgtccaaggagacccccatctctctgctggcgagccccatccctgacccttctcatctgggcgccgcgtcctcagagcctccaactcggggcgcctctccatcgacccattctggggcctcgttctcctctggatctagccctcgggctcatcgcaatcagttcaaggaaaaagattccaaaacgatgcaggcacccatcggcaccaaactagtcaacagatccaccggatccccagtcaattatgaattctaagccgaaggattgggacatctgcagtaaataccacacacagcgaaaagacttctcttgtcctccatcctccatgtacgatcatcaacttaaaactcgtggcggagctttttttttccccctttccctctatttatgacttcgaccatatggatacgaagcatttgggaagcttgaccatatgataaatcgactaacatctatttcaactaaatatacctttctgccggacaggatgtcatttatgaatgggtggatagtttgcaagaccggaccatgctaggataccttgcgtttatgccggatttcatccccttcttcttttcgtgtgttttctttcgcttttgttggatggattcatcgttgtatatcctcgaggggtatagcacgatatgacgatcaggatacaacaactgcgcactgtgaagcttttgagattcttcgagatatcggtttctgtgaagtacctgtggatagcttctttctttttctgtcctttcttttccctatttaaaaggcttgtgtttcggtgtattataggggagttgcgactataacatacgtacactgatccagaaaacaaacaaacaagaaaaaaaaataggactctagggataggtacagcaatggattcacatgaatgcttttctactttatacaggaagacttggccaagatcagtatcatggtactaattgaaaggagtaataaggtgtatgtatgaagatgaatgagtataatacattggataagtaagtctaatatgacattgcgattgcgccgctcctgatattttaaggttcaaaaagcacccagaccaacagacagataaattgtacaccccgcattcgtacgttgctcatattcagcgtagtctcttcttctgtgctttaccagtgacccgaacagcaaccctctctcgctcttcagttgccttggccctcaaggcagggttcaatgctggcaagacccgggccgcgtcggcgatgaccgccttgccatcaatgatgcccgctctttccttctccaggcgtagtctctcagcacggcgagcttcgatttgtttcttgcgctccggggtcaacttccaggagtcggggaattggagcttggtcttcggcttgtggtgacggagatcaaggggaatgtcggcgaatgcatctccttccttcgcctccttgatcagtgagtttacggtatcggccaggtaacgcttattctgagcacgagtggtaaacttctcgcaggacatccgtacgatgtcggtgtcggggttgtaccgcggtccgacgagtttaaggaacgtctggcgctgtgcctcggagagatgcttaggggtcaaatcctgggagctcagctcgacgacgaccttgttctcggcggggtgcgactcgcccatgtatgtggtgtagcggaagcggagaatgtgagactggggagggagggtgaacggcttggcaagatctacccagggattagcggggatggggaacagactcggatgaagcacttacggctcagaaatggcatatcccaagcggcaattctagcgtattctctgatctcgcggtgtacctcgagttccgcatgggccatcgacgtgatatcgtcgtcgttgaactcctcatcagcgtcctcgactagggcgaattcatcgtcttcctcgtcaccccagaatccaactcgcttctcccgcacatcgtcaaaccgcatgggatattccttatcgatctggttcacgctcttctcgagctccgcgaacgcggccgctcgcttctgcgggtcattgaactcctccaccatccggcggttctcggcgtcgaattgctcccgttcttcgggagccagcatgtcatacattgaccgttcctccttggaaagtagatcgggggagtactccgccatagaaggcagttcctccggacggggttctcggggagcaggcggcactggtggatcttctgacacgaaactgggcgtagtggcggagaatgagcggtatgggatcgcaattgggcctctccgggccatggacaaggccgaccggcccaggtatcttgctgctgaggccattgcgatgggggtgttgggctggggtttgcttgaacaggactcggcgatgtttttctgcggattgaagttcgcacggatgcactaagccaaatcgggtgggttgtcatccaccgccttacgagcattatcaatacagttgcaccgatgcgacactcggcccagcgttaaactggtccgattgagaaagattaatatgcttctccggcccatgcagggtgctgtacaattgttcttgccagatacaggtccttgaaacctaaaggcaccagtcatggcaccgcaggaccatgaccgccctatgaagctatgcttcgtcacagtgggagctacggcttcttttcatttacttctgcaggccatattggatgacaaatttttagctgccttgcatgaagcaaactatacgcatctcctagttcaatacgggaaggacagtcaagctctctttgaagagcttctcagcaaatatccccctgggagcccgagtcggcacggtattgagatcgacgggttcgatttcaatcatgcaggtctagacagggagatgaggcttgctcaagcaagacctgacgaaggtcgaaatggggggttagttatcagtcatgcaggtaattattgcaatctcgtccacggataagattgtgagagactgatcacaattgaaggatcgggcagtatcctgggcgcactacgattaggagtgccacttgtagttgttcccaatacgaccttgaaggacaaccatcaggtagaactggcccgtgagttgcagaagcaaggatatgtcattgctagcggacatcagtatggtaccctgtgaatactcccgtagattacgctgacctcttttccagggaggtgtatgttgctgtagagcgcgcagaggcactacgggctcgcatgctggcttggccgcctgtcaatggagcaaatcagaaacgtcatcgcacgctggagcaagtgatgtcggatgaattgggcttcttggattaaatccatttcctcccccgggtacctctgccgtaagggcattgtgtctgaacctactggtgtgtttttgaagcttatatactcgtacatgtgggcccttacacggagtatacgattggctcgagaaggcgtacggattcaggcttttcatttgtgttgccaaacttgcaggccaactagctgcacgaaatgttgctctacaagtcttatatgctgcgcaggtgtcagctttataaattccacaagcatagaatcaattgcaaatattaccttagtaccgaaaacaagcaattgaacgaattatacatagattattgtggtagcgattgatcgttatagttgtagtcggaggtggcccaagctccagtgattgttgacgggcacgggaaacatgcaagactccagatgtacgcgaaagctgcggccaggaacatctccctttgtgcactcctccctccctcgatttctcccgagtttctcgacaccaaggactccaattaactacaggctgtcggaaacaattcctccactctaggacctacgtggcacaacctccccggccgtggggccttctgacaacaatcgcgcaacttaccccccgaaccacacccctcgctctcgcaatggccgaggccacccttcataacgcccccattgtcatcgacaatggcagcgggacaatccgcgccggtttcgcaggagaggaagtcccctcatgtttcttcccgtcgttcgtcggtcggccaaaacacccgcgggtgatggccggcggtctagaaggagatgtcttcatcggatcgcgagcacaggagctgcgcggcctgttgaagatccggtacccgctggaacacggcatcgtaacggactgggacgacatggagaaaatctggcactacgtctacgagaacgagttgaaaacgctgcccgaagagcaccccgtcctcctgactgagccgccgctcaatccccgcaagaaccgcgatacagcggcccaaattatgttcgagacgttcaatgtgccggctctctatacgtcgattcaggccgtgctgtcgctgtacgcgtccggccggacgaccggtgtggtcttggattcaggggatggtgtctcccatgcggtgccggtgtatgaaggttttgcgatcccgaacagtatacggcggattgatgtcgcggggcgagatgttacggaacagttgcagttgttgctccgcaagaatggacatgtactgtatacaagtgctgagaaggaggttgtccggaagatcaaggaggaggtgtgctatgtttcgttggatccgaagcgtgaagagaaggagtggatgaacagttatcataaatcggagactaaggccgtggactacaggttgcctgatggccataagatcaaggtttgaccctacgtgcatctacgattgcttgggtagttttaacgtccggttagattggtcaagaacgctaccgtgctcccgagatccttttcgaccccgagctgatcggcctggagtatcctggtgttcatcagatcgttcaggatgcaattacccgcacagacctggacctgcgcaaagatctatatctcaacattgtcctgtcgggaggctcgacgctatgcaagaacttcccagaccgactgatgcgcgagatcaagcgattggctgttgaagacatgaagatccgtatctctgcaccggccgagcggaaatacacgacctggatcggaggaggaatcttggctggtttgagcacgttccgcaaggtaagtccgctgtcactaccagtgacacaaagttccatcacctttctccaatactaacaccaacaacctttagatgtgggttagcgcagacgaatggcacgaagatccggagatcatccatcggaaattcgcctaattctgcattcaacaccttgaacgcaagacagcataagtgacgttagtcatccactgctcgcaagcagcgacacagcgacagacccaagctaaacatacattaagtgatgttattgggaagtcacgaaccctcgatagaaccgtcagctgctgttgtccgcagatgagcagcagcttttgatacccctcttttttctcaccttagcaccccctatgatatactcatggcagcatctgccataccctcgtatcatctctatttcttcacccaccaactcacacaccccatgtcctagcggacatgctcgatcatccatcacgtttctcaccggctatcacgaccacggatgaatcgactcatgtgtttctcttctctgcgccctgtctaattgttatgtctgaccccctgtcaagtgggtggtttgaattgaattaagctgtgtaaatattgggatagataaatgaatctttatgaattgcagtctcgatcacattagtacatagtatttggaccaagtgtaaggttgcaaaacggcattagtacctatttgattcatgagtagtccagaaatactaacaccttcctccgaagagtatagtccacacaactcaaaacactacaccatatccacccacacaagaacaggccatgaaccatagcctataaccaccaaaacataaacaaagcaccacagcaaatgaaaacccccaccaatctaacagaacaacctccctacccctgaacacagctcatacagacactatacccactctatagttccaattggcggcttctacattctacaacggaccatgctaatcatatcagaaatgacgtgctagtaatactacccaaatacagagtataaaaccttcaaaataggaactgttacaaaaggcaccagctatatacaattattcaatactgcatacgatgtaagtgtccttggatgaggtggtcaaacatccaaaaaatataccaagacacgagagtgcatagtgcatacatagtataggaattatacccagctctaaccccgcagtaagggggtggatcgtatatcgtcataccacattgattgttcaggggtacacataccagggatgtatactccgtacagtctgaaacatacagtctacaagatatacctctacatccgggaaagaaaaagtaaggagataacaatgtgtgttcgaactttcttgttccggttcatttattcagggactaaagcaacggtttccagttcggagatatagtatataaaaggtaaaggacgtgaaaagccctattgccggttccagaaccgggcgtacatgtagataatgaagacatggagagtgaagatgtgttgaaacaaggtttaattgaccctgaataggcagtcaagaaagtaaagtgccggttggcgattgggggtatcaatatcgacatgggagtcgagaaatggcgcaagagaacagcaagttaaacagatatgcttctctcgttggagaaagcgaagtggcgagattaaaaagggatgttgaattagggggtttcgagaatcgcaaatgaagttgaagtggaaaaggagattgaagagatgtggaaaataaaaactttttttggtgtggtcgtaagtcgtgatgtttcatgttcgaaatgcgaatgcgagaacgctcgaaccaaaggacggcaggccgtatgcgaatgtgtcttgcaaagcgtctctatgccattcctctcaacttgccccagcccttctctaagccgcgcagggccttctcccgagtagagctggtcgaccccgtgctactcgacgtggcattgctactggcggagaacttgcggctcagggtgcttccattgtcgctgtagaccatatttccggcaccaccgcggccgacgtggtagactggagcggcgcgacgaaggtcccgttcgagttcctcgtcgaagctgaagatggcgcgctcactgctgctgtggacgtttccagcaccgccacggccggacttgtagacgggagggacgtgagagtccagacgtgtcaaggatgggggaccggtggccgtctgtgaaggggtggtcttggtgttcttcaggctgatgatgttgcctgcgccgccgcgagctgtatgaagagctgggcgcgaaacggaaggatggggctcaacgacccggtaattcacggttgctggcataattgctgtatgactgtgggcggtgtatctgaacaacgatctaggctcgatgactcaatgatagcagatatcaagcgggtcgctggatatatagcagtatcgtaaacgatggaccggaatgcaacggtacaaagtgcaattaagaagtcgagatgagttcacgagaagaaaagacagaagtgggaagtgaactaagaaaaaatgttttctttttcctttttcctttttttctcttctgtttagctgatgggactactatagactggtaccggacattgcggcggggaaggtttttatatagtcaggaagtatgacccccagtgttaccagggaaagaggccaagaaaagctcgcaattcccctgttgtgccgtgacgaacgcctatgattgcaccattggttgctctgactcctttccaggcacaggcactctggatccaagggtcacacgcagtcgctgcgcggtgggttggaattgtggagcccatttgttgtactccatattgaccgaagttatgattttgggaatcatgggatgcgcaattaaaaataaaaaataggaaaattctttccttgtcccatgttaggtaagcgaacccccgaccaaccagcatccggcacgagttatgcgcgcggtacagcgccatgattttgacagttgggttaaagcagcggcagaatcaggcggctgtctgatccagtcacgttgtgcattggggggcattccgagcggtctattggagggaaagagttccactgtcgcttgatccacgttgccgctttatggctttttcagatcatctgacatgggtcccaagccatggcgaaacgtaatagaaactggcttggcagccaataaggggcggtggcggctcacatgggagttttctgggggtaatgaaaattgctgactcgacggtcacgagtcgtcaccttttgttggcttcaattgcgaaagttgatccttacagtatgtgagactctctgtcctcttggttcagccctgaattttgcggtcaggacgcgattttgcatcactgggggattctagatgagttctatgctataggaaactacaggtcatagtcagactctgtacatcttagctccaaatgaggcaggggaggaaactatacaaatcctaattattataatttgataattagttgtttttctgggactctcatgcctccttctagacaaggaaagaatttccccgcaaaagggaaccggcggcatgattgcatcatagcaaaattctaatatgattcccattatgattctgtactgccttgccagaccaaactctccagcttcctaatactacattccgggtaaaacagatgcttctagattgcacggaaagaatggaactatccctgtcattctctcgtcagttcctgtctccggaagagcggcaatatccgaagagaaatgactcaaaattcaaagtgatgctcagggggacgaacggtctgtgatctccaattagggctaacggactactaatgttactattgttacggatggcatggcggccatgctggctgtccttcttggcatggggctgatctcaagaaacaccgatctgcttcaataaatcactcactgtaaatcctcagcacatgtataggtttctacattatattatcatcggtcatcaagtcccagtccaggctccagaccggacatcgtggcatgaaaccaacccccgcaccagcgtctgccgtgagcatgaatatcatcatgtaacgagatgcgactggaattgagaggatccacggatatgccaggctaaaccgaaaacaggcagtttccccagactattgagggctggacttagcgacctttgtcagagaaaaatgacgctgacccagaaatgcctcatccactgacacgtccttgaaaattttttccattctccatctcagccccactgtcataaaacgctgactggtctaatccaccgacccggtcgaaccggtgagaataccggcctctttttggaagctgatccactggaggggaaaaaaactgatcaggaaaaaaatttgaactgccggaaaaaaagaaatctacgatccttccccggattttggccccaggcagccacgcttgcaggtcacactgtcacgcatcactcttgcatcttcgatcgcatcaaccacgggtcctgactctcggtctccgtcacgtacatctttcaggtaagtgagagtaccagatgcccaattccctaattcaggtgcccttgaccaaggaatttgtctcgctcatcgccgcctgacatggcgccccggagtcacttacctcgcccctcggtttgcctcggatgttttgcaccgaatggccgtgaaaccctagatcgtcacgccccgggtacttcccagctcgctgatactacacgacacgccgagtaggattcttcgccattctggagaattctgatgcctaccggatcgcctctggaaggataccgttacttcatctaggacctttcacggatacgtcatcaacatgttttctttatcttttctactggtgaatatagcaagcacacataacactgaatatgcaggtcatactgtagggaaaactccaatccgtgacatatcatccatagttgtcgtctgtattccaaccaggtgctacgtttatcgaacattcatccaatctataccgttgaatcgataccagagtgctttcatttggaagaaccttgctaatgaagttaacctcccgagatatgacaacagcagtgagtgtgagatggatagtcatagacaggctcggtagtatcggaatgcgcgaataagattctctccccaggctgatgtctctcaatttaatctcgttgacaaatgccaactgcaccatgccaatcacgtcagagacaagcatgtgttggcaatcgctttcgttgacgtgatcaatgtagtgctttgatcatagaaacgaggggtatcccctcattctcgtcgccttttcggttatgagcaatgtggtgctcgttcgattaccgactccgtcggcgcccgatctgaatctagtgcatatgcaatgtaggagcaggggtttcctgcttggacaggggtgaaatggcttgtctatgtacccatgtcgtttaaaaaacgcaatatcatatctataatgacctgagcggagggtaacattgaagagaagacgacagagcagaagaatgacccattcaatggaacataagaagcgggtcgttaaagatgtaagaaagcaaagaccatgatctgcacagccctaaccggccgttatccccgtaccctacattgcaaatttctacccggccgcccaagctgcggaaggacatggaaaatcacgcatagcaaaactgacatcgcagaagtacctaagctggtggacatctacttgtcgtcgcaatgaggggggtgtgtagcccctgtcataaagacaatccaaagtaaaattgacgagctccagagctgctatcaaaatgacagcgtagatcatgatagctgtgtcgtaccagcctgcgagccatagcgcaataatggtgatgcttatgcatatcatcatgataatcagccttttggatcgtccgtgacattggtgatgctgttgactcgggcgaagaaagtgcccataaaaattatttttcgaggatataagctattttcttcgggtgaattgagagtttgagttttgagtcgagcttcctgcagagtgccatcatcattgcagtctatgctaataccattgctcattcttgatatgatgcataggccagagctatgcagtcagctaaggaatctcgtcctgtagcttcaagcgaaattgtagaatgccagtgtctacccgaacttgtagataagttagggttttgatctgctataattgacaatgattagtataaaaacttcggcatatttatctccacagattgagccaaaacggctccccctatcgtgcttctatgatagccatttttcgtggatgttagcagtgtgactgttgactggaataagctttggtttcctttttcatttaagccgttcttatgcgggtaaaaggcttgtatacaaaaacatgtagagctactcatcggagcaacggtattaattttgaacaacacaattgcctggattaatcaatgtcagtatataaaattgaactagactggactggaatgagacaggagctggcagtgcaaatccagcccccaacgttatacaaccacggagataagcgaatatcagcccgaacttcggggtattccagcaaatccccggactccggacaataaacattctagacattcacggccatttctccacaactacactcctgttttcatccttgtgttaccctcctatatatctggcttgaaatgacggctcgtaacaggacaacctcatcgtcactgccacgtaaacgccgtcgtcccgccaaatcatgcgagcaatgccgagagcgtaaggtccgctgcgatctccaactgccttgtagggcttgccgacatgctcggggaaacttgacttgcacgtatagagaatcgccgcggccgagaccttctcagaccgatgctcgggcagtctcaagaagtccggacatacctgcgtcaactttcgctgaaggggatcaatctcaacaacagtctcgcggcttggggagtatatctttcactcaactagagcaagacgatgtagtcaatacaaggacaggagcgagtggtagctctctacagcatttagaggaccgcctgtgtaaagccgaacagcaattgtccgaactctctcggactcgacaattttgtgctgtgtgtggggacttgactattcctggtatcatgcctcgcctgcgaaatacggcagaaaagacgaaactgttcggaccaagccactggatgtacactgccgagaaggttggtatctaggaagctctcaagaaaattctgttagctgatctgttgtagatcgccagcgaccaaatcgactctcaaaatatggatatcagcattgtggacatgaaagcagatttagcagatatggttaaggaatgtcgaaacctacggaaggcggcaaaaagccagcgaaagctgcaactaaacgatcctgttcctgacctcttaagtacctttcctgaaaggcatgtttgtgatgagttggcaagtgcttacatacggactttcgaaaaaatatatcgcgttgttcatatcccttctttctggaaagagtattatcaattctgggaagcaccacatgcctcttcaacgtcattcttgatcaaactaggccttatcttctctattggcacgactttctaccctatcctgggagagtcggaacgtctgcgtcacttggcgcaaacgtggatatatgccgctcagtggtggctggtagggccttctgagaaatcaacaagaaacctggacggtattcaagttttctgccttcttctggtgtcacgaaaaacaaacactatcggaccatcgccatggctatctactggttctctattaagaatggctatgactatgggattacatagagaccctcgagtctttccaggcttagcaccatttcaagcagagatgcggagtaggctttggacgactatcctggaactggtggttcatggatctatcgactcatcttcaatgccactaatgatttcgcctcaggacttcgataaccatgtgcctcataacatcaatgatgcagacctatggccagctacccaggaattctctaccccaaaaccactgaaacagtttaccgagtcctctattcaattattgatgcgacaatctctgccaatccgtatggaggcagccaaactgatcaacagctctaacttggagcagtcatataatgccgtgcttcagattgcaacagacctacaaaaagcctgccgtgatctcgcaacctacttccaactgcactggccgcagtactcaggcgagactgatctacataggaagttcctcgatatgcaaattcgccgctatatcctactgctccaccggccttacatgttacaggctcagcataatccacggttctacctctctcggaagatctgtggggagtcggctatgatcatcgcatcatatgctgaaagtcttcagctcccttcccagaaccttgatgacctgtcacgtctcatggtaatgagcactgggccattttgtggtgctctccacctcgacattattactgttctagggctggaggtaacgagtcagctcaaagaaacagctacaggatcatcagaacctggtcagctcactatggaccctctagccgagatgtccaaagcacaacgagagcccatgatccgcatcctggagcatatcaatgatcagatgcttcaggttgttgccctaggcattgcgaggttcaagcgatacatctttctctcagtcgtactttgccaaataagagcattggagtctggcacaagagacatccggccattgatgatcaaagcagtccaggagagtgtgaagaactgctatatggcggtccagtcgtctcagtctgtcagtaccccgcagggcccaattgagacgttgatctgtaccgagtcgccacctgggctagattttaaccttatggtaagtcggaagcttcatcttctaacagaacgctttctaactctactaggatcctaatcttgacttctcggcattctttgctcactttagtggtggcggcggtgatggaatgtatgagatgaccttgtagatacgctctacttcttgacattgattcggaatgatgtacatagccctatttgatgatgaggaacagcaacttcctagctgttacgtataatataataaacaattaatagcaaaaaactaattgccaaagttgtattggaaacaattcaccaactgtgaaaatagctgtcaatgaaggcgataaagagtgttagctaatgaaagtctctgcctgcttagtatattccatgtttaattcatcctagcttcagcgttccctatgttcaccctcctctttatgttgtaatgaaaagagccatctgagatcctaaatagtatggatggcgttttatgcctcaggcatcaagaaggccctacatattctgccatctgctaccgccattgtatctccggcgcattggaactccgcttcaacatccaatttcgatacaattcttgtctacgaccttctgagcgactgtcaagccgtattgacctcccgaagggctcatataatccgatatactacgctgcatctaccaaccgagttaatctcatccgtgaccaaaccaaaatcacgcgcaacgcgccacttgagcgccgccgagtttaagtttcgcctgcaacgttcagaaagcagtgctcgttcagattctcaagatgccaaaatatatgtaactccctccccaagcttaacggacctcacaactaactatctgtgcactcttctgtaggttcttgcttctccgagccacaatatatgtgacgttcatcaagctcgccatcgagcagatgcagcgatatatcgatatcattcccagccacatctttcgctgactctgcgatctacttccacaggtgattattgtgatgtgtacctcacgcacgactcgatgagcgtgcgcaaggcgcacaatgcaggaaggaaccatctaaggaacgtgttggaatactaccaacgtacgtttcaactccgtcgtctaccaaggttaactcaatcaaatgctcaccaacctcatacagaaatcggacaagagaaggcccaatccgtcatcgactccatcacctcgtcgtatgccgccgaaggccaggccgtaccgaaccccgcgatggctcctccaggcgccttcccccctccatttccattcccaggtacgcttccacagcctacctatcccaagaaaccaaaaagctaacaatgggactccaggacgtccaggccaactgccaccccctccattcggcttccccccaccaggaggaccaaacggtgccccgggcatgccccctcgtacgtgacccaaaccccctccaaccactcaacaccccaatccactaacacatggtaaaaaacagctccaggagcaaagggtctccccttcccaccccccttcccccaagcctcaggcgccccaggcagtctcccacctctccccaacatgcccgcaggaaacgtccccttccccccaccaccaggcggcttccccccgaacttccaaatcccagctcccggtgctcccggcttcccgccaatgcccggtgccatccctggccaacctggtttcagccccagttctacccccggtatttccggtcccccgggccaagagggcggatatgcgcccccgcctggtgcaggctcagcgggtctccccggaccgccaccgggattgggcgagcctcgttgatttgtttcgtggatggatgggaatgtctaactattggggttttatgcttggggtttatgctgcaaatttaaactataccttgccttgctctttttatatttttcttttgttaaaggtgtgtttctactagagttctgtttccggcgtgcggaccttcggtatatggtgtttttctttgaaaaaaacttttgtctactgagaactgaatagttgggagagagaaatcagaaacaatattatggttatgtttattatcaggctgttgagttctgggatggacaacgtccggcttcataagttatatgtagcgtccaatgtcaggtagttaagtctagcctttctatacgcagtgtacaggcatgaccacggattcggtatcttcaaataactcgcaattcaaataccatacgtctactgacgtgggcactagcattatgatttcctctcatacatgaaatcacaaataatacacagggacatcggctcaggccgaaggtagtcccctgtcttaagatatatagatcacatcgaccgcaaacccaagtcccaaatatccaaatccaatgctttagaacgccgtgtaataacaagaaagaaaatcctggtaaggtgcaaaagagggcaaggggttatatagaagtagaataaaaagaaaagaagcggacttttcagtatatcacagtatacggaaaaggaacagtggttggaagaagagcaaacatgaacgggtaaaggagaagaaaacaaaatgcacctggtgcaaggcaaagtggaatcaggatggcagaagacccactccatttacgcgctaagccgtaattcatctcaagcaaagcgataaaacattcattgtattcctttagtgatcatatccagctcctctttgccatggactggggttgttctgtgccctataagcgttgggattgttgagtggggacgcagtgtaaccccgcgggactggtgacggtgaccgcgcgttgtagctgggaggctcttgtcgtcctgaagcgtcgctggggaacagtggaagggagggatcaaccggagaaactggggcttgacgagtattgggcgcttggtcatggccgtgcacatcgaggttttgacggttaatactggctccgttgccgctggagaaggaaccgttgtcatcatcaaatggactagacttgtaggctccagtcttaacatcgccacgagcagcggcacccagggcatccaactcagtcgtcagctggccctgagacttgatgaaagaaccgcgatcatccctcatgggctggtaccgcatatccgggttcttcgagacaattgcatagatagaagcgatcagcaccagaagtaaaagaatcagcgcgaaaaccgcattgatcacgaagaagacgacgcccatgacacctgttaccaggccaggttggttaaaaacttcggagaagaagagaaggaagatgacgttgaggaaattcacggcagcgatggagatattatagatgttggtcttcttgtccatccatggccgcagaacactgacggcaatcaacataccagcctcaaggataaccaaggcaatagtcatcacaactggcgcttcttgactcagaccaataaacatgcctttaacaaggatgtagcccagaactggaatgacaaagtagtatgcagtcgcccggtattgcacatacaagaatccccatttgttcagacatgtagggtccgagtagaggatgtatgcagggtttttatgcatggtgatggaacgttttgccagaaggatgaccttgaaggcagcccatcccagagccgcgagaatagaaaagaacatgatcacagccaacacaacctcagctgcagagtcatgctgggtgaattcccacaaacagaggacggtcatctgagggaaaccgattaaagtaagtcggaacaaaataccgcgggcgacgatcttccaaccgttacggaaatcctgaaacttatcggttttcatcttgccgttcttggcaaggacctcacagccagccttgaaaagcgagacgaggatcatcaccacagccacgaagaaaacgaagaagataagaccagtcaggaaaatattagtcgcctcaatcccggccttgaacccaacacgcttgataccgcgaacgacaagattcgatgtgttggctgtctcggattcggcaccggaaccacgcttgataatgtctgatgctttcttgactaatcccgtggcttcgtcgagggttcgctttttgagcacttgcacagacgttgttgaaagttcggaaagggtcgttgaaggtgttcctccagtcgatctttgataccaggtacaaattgattccaggaatccgatatggatgatacccatactccactggaagttttgggtccacgcctcaacgatcgggggcatatggacagatgtcataccgatcatcgcctgcgattgcataaagctgaatagtgagagtgcattagccgccacatgcgcggcggtgtttgaatgacctaagccagaagtgatagcagaagcagccaagcctaacccggagataatagctgttgaccagccgacccctttttggtaaaccgtctttccatttgataacgaagcctcaacacacgcgatgctttcgccagtatcagtggagttgatgtagatacggacggaagcatcgagatcgggaactgtgtatgcaatgcctacgcgatgacgttagcgacaatgaccgtgccggagcataatagtctgtacccacctgggatactatttactacatcttgtggaacatcgatctgagccttgggaacatcgataggtccggcactcatagggcatagacccccaatgttcatttcacaggggtcaatttcttttttaagcgccgtgtagccatacgcatcaaggacgatttccgccttgactttacccgaaattgcggcgactccatcgaaactgaagactaaggatctgttgtttggcgtgaacgttactttgaaaagggtcgctgtgaagttcgaactgtcttggcacaggttaagcgcattggattcgatcagcttggtcgcggttactagtggtgcacttaggaaggcgagcagaagagctgacagaagcgccttgaactgcattttcgtgataggattaccgacttcaactcctccggtagatagcgaatgcgaattttaatggttatgagcgagggaatagggagacaccagaagcgagatagaatagaaggtggtactccagagcaccagcttgggaccggccggatgcggaagtctcacggtacactgggtcgtcaagttgtgccaagtcgtctagaagcgagagcgaggaaggaggtatccaagatggcgaaaagtaaaaattattgtgaaatagcttcctatattggttacaacttcacgtcattgaagaatcactgggcggtaaattgatgaccacagcgactgttcatcgaaagcacaagagaaggacgagggtgggagaacaaaaaaataattaagaacaaaaaggcaccaaagtagcgaatggtaaagaatggaacgagttaacgagtgtcagatagtcggagttgtcgagagttgaagggtacaataaagcgagcgggacggcgacacacagtatagccttgaagggggtcgggaccaggggagggaaactagttgcctgagtctcccaggaacggagaggagaccgttctcactcggattgacgaggagagtttttgggggggggaaaggaaacgagcggaaggggaaaaggtgtagtcgaagaaacgaaaaagagtaaagaagaaggtggagagatgaagataccctctctcttgtctccttcaggcgacgatatttcttcaggggagaataaaagccgctcagccccggttggaggagagacggtcggaatgctcgtgaaacacctgacgctgagaccctgactcagcacggggggtgatttaggatgtcggagccaatcacaatcggcgtagcgttggtctgaagaatggatgttcctctcccttaactactcgtggtagcaacaactaaactaatgtatgtatgtatgtatgtatgtgtgtcttgaagcacaacacttttgacatcaaccggctgggctcgaaagaaacgaaggggtgaagtatggggaagcacgggaggggaaaaaaagaagaaaagagagagaaaaattaattaaaaattgaaaatccggaaaaaacaaccaagaatttagaatgatgccaacacaaaaactactgctgccactgctaccctgcagacaaacttgccatctttcctacaaatcaactcaatttttgctctaaatggacgaccagttgagttctctctcccacttttacgttttctcaggtccagtcggcgcacgcgcgtctctcaggggggggttggttctgggcccgcatgcggatggttatgctcagtgcccacggttcatacctctcatttgctcaccactaacggccaagagaacctagttagcgcctgcgaaaaggctgggaatggaaatgatcccaagactacccagagaattgcgagattacagccatgacttgacctggtggagttacatttccagatacgacaccgcaagaagtaagatacagtagtatgatcggtggatcttcttgccgctcgtcttacggagtactctattttcttgcgttcggatgctgaggatagccgccgttcaaccccatcctgtcaatgaaccacatcgactatggagtacttggcaacaatttttttttctcgccttttccttctgcctactgacatccttcgcgcttcgtgggactgggcgactgctgcttcataggtttctattaataaccaactacttacatgatatctcacaattttatcacagagactaccgcaataaatgtatgtactgtatgtgtgcatactgctagaaccaccggtcattattggccctgtgtgagatgcaatgaaagtaccatcgcatatgcacacaataccccatatgctcataatgtggttttatcttgtgttgaactgtcaaccactcgcacctcatggtggtgatctcccaatatatgtaatatacggagtccacggtataccaatctcaagaggcgggtctccgctgtcttgtcgacgtattcgttttttcctcttttctttccttcgtttaattaaacaactcggctagcgttgagatgaccaagaaggttacaagaactaagagtaagtggcactctgttcgtaagtctacaatgcacagcccctcccattcaaaaacaagggcaatcaggtcgccctttagaattactcccaagtcttacagaagtgaaaattctgtaattaaattgtcttgggcgtcaattgattcattgtaaggaataaattccatgaaaaggagaacaataatcaccacaattttctttgaatatgaaaaaagaaaaaaaagcccaggaatggaaatttcccctcctccatccctgaggtgatcagcattgatcatcgttgcctctcccatcatcggaatgcgtgtcatgacgtcttgaccccatcggatcctcgtcgaatacctggggaacgcggtgagtttgcacagtatctctctcctgtatttcctggttcataaaattcttgtaaagtgcatgaatcatgacctgtaatttctaggaaaggtcttgaaatggaactgatttctcaaccatgggcggcaggcgtttcctatttttagtacgtggtctttctgaacccagaccgcgaagacttttcctcccactgcgtgtcttggccactaacttcaccatttacctcattagtggtctgtttcatacccatccctcttaatttagttgaaatgctccttatatccctagtcttctttatgagtggctcagaatctcgtttcagatgagccgactggtgggcaacaattattgtaactgcctaaacggactccctgaaaaactgattcaccgttgtcctcgtggcgcaattaatatgtcaggtcgctttcaagttgcaaatgcgtttgactgaatccattccctaaataggtgaatcgattctttgtcgcgtatgtgatgtagaaatcctcgaaccgctgaacggccacggcttctatatagcttagcccgctcccaggccacaatccactgaccttgccggtgttggcgttttttaaaccaggatcgacagtcgttctcccagattgtgctcttcatgaacaagtccttctgctccatgaaatcatcgaccgcttctaacttgggctcgaacgtgcggatgtcttctttctgccaccggttgagaaacttggcgatatagtgttcctgcgcctcaatgcaaatgataaggggtgaattggcaaggggctgttagggccaagtaacatgaagtagttccgaaaacctgagccgcgattcgccgagtaacttcgcggttcctctccccagacttcggcaaggttggtgtcattgcgacctgttaatggaaatgcaggtcgaaagctggtctggaagcctgtgcccaaaccaagacataaaatgcatactcgctgccgtctagcataatgtcgccagacggtgttatattccttgatatttccaaagacaggctttacgttgggcttcgtgaggctttccaggtaattcgtactgggatataacattgtcagtaagatatgctgctagcgaggtaggatatcagactgtaaggcgacgacatccgaatggatgctctggaatcagctttctgcaaggctatcatcaccaatcgcatccgtcatcaatttttttttgacctttgggtagctgctttctaggataccgtgtctttcagaaaaaggggtagaagagtcgtatagttagcctcgatatctttccgtagctagagcagtttcctgagattgtctcgaagcgtctgcttttcttcgtctgtgtatctgcgttgtttgtatctcatctctggaatcacccaggttggtctgcgcatgaaggctatgccatgtcctgcagtccttgctggagctgctagagatgtggcatacacggataccttgacttacctttgaagctcaggaagcaattgtataccggaagacctagcaaactcagcaactgggagtcatgagcagcaagaaacaactagccttacccattcccaatcaacccgacccgctttccagttaacggcaaaagatccatcccagttcgcggtatggagcagccttctattgaacgacccaagacctgatatagaaagccaacgccaggagtttaaatagccagtgccatctattaggaaatcacaccttctctcaaacacttccttcttgggatcttcgactcggagcttccactgtgagcttacatcgtcccaattagcgcccaccacccgatggttgcaactgaataaatcgcgaaaaccatgtttgtccgcaaacccggagaagtagccatggatctccggctgaagtataactagctgaccagtcccattaaggctcaaaggagtaagtgtacatatgcctgttccatgggtactttcttctatcatgatgtatatgatccactcacgatgggacatcgcaggtgcctgagcctcattatcagattttgttacttgcctcctctagaggacatatactcacatccgggatatcgattctcgaaccatgttcctccgatatattcattcttttcatacacttctagcatatagcctgtaaatgatgtctcaagcctatatgctaaatatagtcctgacggccctgcaccgatgcagatgacgcgcatcatgcgattggcaaggataggtttatcacgataactttccatcattgaccatataatttcgctgcaatctaagatgcttttgatgaaagacgaaaacttcgagaagcacccccttcgaccatcattattcgtttttgaaatacgttcctccacgtggtcaccgcatgatgtaatagtatcttggtatagaactctttcattcttgtttttgcgtccccgtaaacaaggtagtttccgaaggcgaagacaatagatgcgtgtgcaaacacattatatacattcacttggctgcctagtacacctactcactcttcatcctgaaccgagtgcatccgctgtctattcctggaatagtccagctacgagcgttctcggggcggttgagctactatagattagctgactagtcagaagtcttgaaaagcaaacagtatgatataagtataaagaagttcttgggaaggtatttcattagtctaattgtagaatattgatctgcacgatgctgtcgggtccacctttcatatactcttcttcatacggaaaagcgccactgccacctgtaatttctgccttattagcatggctcataatctgcagaccgcccagctatcaggggctatcagcacgtgatgcgggaagtttggccaggcaatattttcgctccgcaaaaaaattgtcttccgccgagaaaaaaaaaaaaggctccgcatctcacgattttcatttggcaagctttccaggagaaacccctctggagaaattctagccaaaatgccgatccctgtggataccgcccaatctatctcgaagaagcgcaagagaaagcatggtggaaatgcgcgcaaggaagaggctgctgccccagctgcgactgaagccgtgatcgaatctcccgaaaaggaggaagttaccgtcgagaagaagaaggcgaagaaagagaagtccaagaagcagaaggtcgaacatatgtctagtgatgaggagcagaagaatacggaagaatctgagcaggaggcctctgataatgaagaggagaagagcgatgctgaagagacacccgccgccaacggtgaggatcttccttctgcggatacgatccgtctgccccagcaggatggtgacccggtgaagttcacggagctgggattgtcggagaagactatgaagggtatcgagggaatgggattcgagacgatgactgaagttcaacggcgtacaattcctcctctgcttgctggtcgcgatgttcttggtgctgcaaagactggttccggaaagaccttgtccttcttgattcctgccattgaaatgcttagcgctctgcgattcaagccgagaaacggtatgttctacgcattttcgggtgggtccgcggttttgtatactaacccctgcgttttggttaggtactggtgccattatcgtcagtcctactcgtgagcttgcacttcagattttcggtcaagttagggaactcttggcgcatcacagccagacctacggtattgttatcggtggtgcaaaccggagagccgaggcggagaagctcatgaagggtgttaaccttctcgtggcaacacctggacgtctgctcgatcatctgcagaacacgcaaggattcgtgttcaagaacttgcggacacttatcagtacgataaatcttttccgcattgcgagtgggtgaattgagtggctaactgttgacagttgacgaggcggaccgtatcctggaagtcggtttcgaagatgaaatgcgccaaattgccaagatccttccatctgagaacagacaaactatgctgttctctgccacgcaaactaccaaggttgaagatttggcccgtatctctctcagacctggccctctctacatcaacgtggaccatcgcaaggagcacagtaccgttgagggattggagcaaggctatgtcatctgtgaagctgacaagcgtttcttactcctgttctccttcctcaagcgcaaccttaagaagaaaatcatcgttttcctgagcagctgcaactctgtcaagtactacggtgaattgctcaacgtaagtatatttaattttgtgagccgaggtttgtagctaacacgatagaactatagtatatcgacctccctgtgcttgacttgcacggaaagcagaagcagcagaagcggaccaacacattctttgaattctgcaatgcaaagcagggaaccctgatctgtaccgacgttgccgcccgaggcttagatgtatgtcaattgcctttctatcctgatgtatgcctctgttacacccgtctaactttctcaagattcctgctgtggactggattatccagttcgaccccccagatgaccctcgtgactacattcaccgtgttggtcgtacagcccgtggatccaacggaaagggacgcagtctgatgttcttgcaaccctcggaagtagggttcttgaagcatctgaaggaggctcgagtgcccgtcgtggagtttgacttcccgactcagaagattgtcaatgttcagtctcaactggagaagctcattggccagaactactatctgaacaaggtgagcttcgctgatttagacatcgtatcgtgttcctatactaacgcatccgcaaacagtccgccaaggaaggttaccgctcctaccttcaggcatatgcctcccactctctccggtccgtcttcgacgtgcacaagctcgacctggttaaggtatcgaagggcttcggcttctcgacgcctccccgcatcgatattcagctcggttccagcctgaaagacaaaccaccacagggccgacggaactacggcagccagcccggctcgaagttcaagcgcaagcataatgatgactgattcgatctagtagagggaaaaagcaattgtcttccttgcatgttttttgtccgttggcctggagtttaacctggatatttttttttctatattattatcatggcatatcctattttacttgccttcatacaccaaagtatggaattgtatttagatacgtcttcgaggaataccgaaaactacagtattcaaccttgttcccttgtctgggccatgtatgtcatctatgatgcctaaggtagcaaaattggcaatgcggctgcaggtgcagggtcagccatctatttctgtacttttgcaatctcgggatacgacgtcccccgcggccagggacactcttacggtttgtttattatattttcctacgaacataccatgcgaattcggtacgatcgtcgggtcataaaaaagagcaaaacgagaaaagctggcatccctagttcaagagagccgcagtaactaaattaaagaagtattgagaaaaaaagcctacattatatacagccaacccccggcgaccgagttccggctaaataacgagggacgaagacagtccagataagggtcagcagaaccaaggatacggagcgtttctgttccacggttcgcgtaagcagacaacatccataactatacgactatcctcgggtaatagcagacacacgcgtcttgaaggatgattcgatgagcgcaaactacgaatactaatcgatggtggtgagccgagcaagggccaggtggctggtttggtggctggggaagttgatcccccaccaagcaaagtttggtcgagcgagagtgaatggattaaattaactaatggttagtaactttgggggagaatctaggacatcgtgtttaaatgctcgattggattgagaagagaaagtaataaagcatagtaccttaggcatgactgtattctcattgcgaccaatcaatgacatgggacgacggacattttgtcacaaggaaggactgtgatgagttggcagcgggagggccaatggaagtggaggagggagggtcgtcctggagacctgattgagggtcttgtcggagagtgggttccaatgctcgtggcgggtctgccttgaccctctccacacttgggaggattatcccgtcacagctgcggaatcgattcattctttcatagggttgcaaaataatgctgctgcttattaggctgcattattcgttcctggatcaaaagtctgtctaggtcaagaggggcacaattgacgggcataagaggcgtttcatctgttgattcctcgatgccacttcatacgtgcgggtgaagcggtcttgctcgcggccagtcctcgtttcatcttcattttgggatccaagaggtaccgacacacctgtgcaacgatcatagggccattggtagggctcttggagaccgtccgacaggcagactcaattcccacaggggacagatcacattccggtcgcaccacgttaagacatggccgcctcctctttggaatgaacgcctctagatagaagaattcaagaaggaatggaaggaagagcgaagcgggaaagaaggtttattgggatttttatatgaacttttagagcccaagtgacggaggggctcatggctaagatcccaatccatgtcacgttcaatatcaatactgtatgggcaggccatccacgtatacggactatactatatactatgtagtatctgtggcgccttgcgtggggattgggcgagaaccccgattcagacaacagcgtgatttttcaatttccagccattgagaatggttgatcgagttacaaacgaggaagaacccgaacaaatgaaagagaaggactgaaaaaaataaaatacattttcaagagcctaaaaaataaaaaggcaaggctggtaaacgatcttttccttgtcagatggggctgttttgttgtccgccgctaaaccatcttttagttcgccaactgtccatcgatccatcaagttattgttgttcattcactgcgtctttataccccctccgaccagccttcgccttttttcatttttcccaccgctctccgtacgaccattattgttgtcctctcccgatggtggccagtatcccaccgtttgcattttgaattttcctttctttttttcttttcttcattttccctctcatccttacttgaggctcgcatccaatgagttttctatttggcggtatagcatgttaggcatgtgcctctaaattttccgacgggcccgaattaatttattgcctttctacaccgattcttgcagctgttatcgctcatcatctacttgcaagtgagggatcagccgctcacttgcaacggcttttacctttcctcccaccacattctcttcctctttcgttcttgattcctcctcactggtcttgcctctttccccccctcccatatatgctacatcgcttctaattactgcgctggtacgcttaatttcctttctcccgtgtgatatcagatcctctacattcctcctcacctcccccgacccacgatcataccttcccccccccccccccactcttacccaacaccatcatcaccactgcctgcctcctcaaccgctgcacgtccactgtccaatctgtagtgaccttcagcccgcaagcagcgtggattcgctcccagattgcttgtcactctaccagcctctattcccttgcacgcttcctgccccccccctgaaagaaaagaaaaagaaaggtcccactccccgaaaaggaaataagaaaaaaagaaaaacaaaaaaggaaaacaaatagtggacgaaattaacttgacaggggtaatgatcgggtctggttgaaaggagagtctccttattcctccatcatgggtgtcgacacccgcagaccgatcttacctgcacccactgaatctattgtcgacactaccaccactggaggtagcgtaacagggactgatttggcaactgacgtatctcgacgcacagacaaaacgtcgtactccataccggacgacggcagtcccgtaactatctccacccggcgcaagaaccgtacccacggggacgaatccaaactgtcccggtcagcgcagcactcccagacctccctgctcatcgaatatttcgagggcgggaagggttctggctccttggtctcccgacccagtgtccgagttcgagtcactccttcaaattcccggaagcgtaaggattcaaaagatcacatccagattactgaatccaacgggaatcgcaagcccgtctactcgcgccggatttcttttagctcgccatccaagaacaacaagtccagtgatgattatagcatctgctctttcaactcaggtaccgatgagaaccagcagccctctggtcatacacccgtggaaatcgagcttgtgaatcgcgaccagagcagtgagctgtctagcgacacaaggtatttccagcctacctcggacatctcctcgatgcccgcggatagcatgctagaagcctcctcttccaatatacgacgaaaacgcagccaaagttcatcgcgagaacgcgagcacagtccggaatacaaagactatctccagacacccaggcgacaaagaagccgcagcctgagtacggaacgcatcgctcatcgagtagcggagaagctgagtaacgatccccgtgagacttctaaaggccaacggaaaaagggagacactgccgacttccacgaaccagagtccaagtctcgatctcgcttatcggtgtacccggacgaagacatgagtccgaatccgagtttgctcagcgcgtcggcgttgtccgcccaccgtaaatctggcgatcagtattccttccggtctggcacctccaagtcatcgatcaacaacccaaagctcctcgagaccgttgaagatgccatccgtcgattgatcttgcccgagctaaaagagctcaagaaggaccaaaaggtgatgaccaatacgtccaaatttgaacgggacatgaatacatcccactcgtccgggagcaccccatcgcgggacgagctcggaagacgcctctccaagcatgccagcgctcccgacgtgacacggcctaccgtcgtcctgaataaggatgaccaggacgagggtatagtcctttccggcgagccagctccctcgcaacaagaccgcagacccagcgacgcaccaaccgaagctagctacgtcaaatggggacttcggccagaactgacagaacaggagaagctacgtcggcaaaagagcaaggggctgcgggatgctgaaaaggctgccagggttgggtcagctctgaccgctgccgctctgaagcaccatgattctcgttccagcatcgacaaaaccgaacgacgaaggccgagtggaccgagaagtggcaacggcagtttcaacgataccgagttggtcttccagaaacacaacgtggcgcccatgcctctgcgcagcgcgattgaatcggacatgaccagagactcgcttctttccgaacagaccgcagagccctacggttcccgcgaaacctccgaaatccacgatacccgcagcccgcatcgagatttgttggattcgcgatatgaccttaaacacagcaatttctctagccacgacctctcgctccacgattatcctgaagaagattatcgcgaacagagcctttcacctgtaggagacgctgccgcaggagctatcgcggctgctgcagcggccaatctcttggatgaacatcctgggcgtcacggctctaaattcactgaccgtcggcgcaccctcagcccaatccagagtgtggcgagcaaccagagcgagtcccacatcaaacaggattcaatccaacccgttgaacatgacttttccgggactgagagggaaatggaacaacgcctctccatagattcgctttcatctgccccaagcaccaaccttgcaaggtcatcacggcctcacggtatcagccctgcaggccaaaaagaattcctacgacataacaacaagtatggggctgaacttgggtatgaagaatcccccgccatgtcaccacgatcgatgacggagaccgcaagtactgaccccaaaaggatgaccggctttacggacgagagtgaggtgagctacatggaaaaggtaaaccaacgtcagcccgttgcaggcatcggtgccaacccccaggttatccatcccatcgcagtcgaatccgcggtagcctctcttcttgatccgtcaattgtggacacgaagtccaaccagtctgcgccaaatcgctcacagactgatctctcccggcgtttggaaggccaaagtcccaagccagtggaaagggcaaaccagactcctcacggatcccgccaaggaagccccctaaaacaacgtcaagacgcctccagtccagacgcgacctcctttccccgacgaatgggagccacatcgcctccccagagtgttacacagtcactggaagaccagaccgacccaacgcacatgttttctgaaggcatccatgaccgtgagagccccagtccagaagccgaccgaagcccggattctgaatcggaaatcaatacgaatccttctattatccaaggcccaatcggaggaggcatgcatggaggtaactgggcatatgagcagacgccagataaccgtggccagtcgcctatatttgacaatgctggctccgctggcaatacaggcccggggtcaggtgaccaaccggattacggtcatgactactatgaaacgaacgactacaatcccgataactaccttaatcatcagtactcaagaggtccgttgtttggaacgccgccaggcaaggatgagggctatgtgtccgccccaaaccctctctcaccgggtgtcgataccccggagcctttggacaaagggttcggtggtatggacaccaatggtatgggtctcttcgacagtcctactggagctgatgatcagttcatgtctggtcaccagcggcaactcagtggctactcccagggtgtcggctcgcccctgtacgacagtgcaactgggaggggcattgaccgtatccagtcccaagatattgtcgcactcatggaccatgtaagtaattcggtacacaaagtaaactatgcgaactgattctgactcgtatgcagctcactgtgcgggacgcccagcggaatgcccgtgatacggagattctggttacccttgttagaagcgcagcggaaatgcgcaactccttcgaggaaatgaagaagttcattgctcagcaggatggaatgctcatggaggcaagtgacaagcagcatgaccgaacataccgagctctcggagggcctcgaccattgccggccagcaccagaagcgcccgccagtcctctgcagaggacgaagacctacgctctaagcgtaagaacgttttcaagcgtgcacttaagggactcagtctcaagtcttccaacgacctgtccaggatcgaggacatgctcgagcagctgctggatgaggttgaagcactccgcgacggtcaagacgagaggctgggccgcagcggacctcggtctgccagtgtagatccagaaggctacgagcccgaaggacatgctggaacttcttcccccgaccattccgggtacttgctgtcaacttcttctcggccaatgccggaatctcgtggtaatggactgcggagagattctgaacatcgtgtcagcactgttccagaagccgatgaggaaatggaactcaacgagcgtgggaagttcttgagcccgaacccgacaaacgaccaacaggacagggctggaccctcctcggcctccacaccacctcgggcacccatggcctctggcgctctcagtaatgaaacgtccccgaagacaaatgagaagtccaagaagcacaagtcaagcagctcctcgttctttcccaagatttcccgttggtctaaaaccacggcttcttccatgggagacaatatccgcaatagcatccagccaggccgcaaggagcgcccgtctttcgatgcttcgcgttcagggtccgatatccagggaccgtacaaggccgctgactggtacgatccgcaaggcgatgacagactgcggtcgacctacactctggatgatcaacagcaggagaaccggcccccctcgcctttggttccttcccaggtttcggaagctccgaagtacagagctcaccgaggcagtctggatcttcaacatcctcagcctcgccaggggcctactggccgataccagtctcagctagaaacacaagctcagatctacgggatgccgtctggtgccccctcggaccagtggaattcgaatccgagcttgtcagctgggaaccccaatccgcgacacagcagtggcgccagccgcctctcccctatctcggatgtgggctactcagaggccagctctcgacatactggtccaccgagacccccaaagattaaggatgatggtccattggtccctgagcggccgccaaaggtcaaggaggacgatgagcgatcgtacgtggatcgcgttgcttcgcgggtaagtctactatggtcgagggtatttagtattgaagagaagctgactgaatgattagaattctgcattactctcttccccacgcagcacaccgcctccccgtaaacctactgggcctcgtccgctaaattcgggcagccaatatagcagtcctagccgaaggaagcgaagtcaatatcgagcaagccctgaccaggttgacgaggaatctctctactagtcttgcttgacgagtggatgccaatacttccttacgacattacgacttctgccattcacaaatttctattattttatgattctacgtatgttatgcctagcgtccttgcatacgcacgatgacttgattttacaacatgtttattatcggacaaagggtggatgaggctgtaaattttggttttctttctccttacaataccatgtacctgcgatgtccaatagcgattcccttctcttccacatatcttgttggctattggcgatgatgcttcttaccatgcataattcaaatcaaaagcactcgatcgtgttcgtgttgatacaggctagaattcaggatcataatatgcacattcataatcaacggtgtgaacaccaggccatagcagcgcagaccagtatattaattttgacgtttccctccattgtctttcttaccttgtgaccatcgcatgagccaatttatgtattcgagagacacgatgttccttccgcctcatactagtacaggcgttcttcctagtttcctcctctcgacaagggacgtatgagaaggaaagagcgattgtgaacgatacggagaagttctaaaaagtcgaattcctcatccattcaatgaaatgtaccacaccttcatagtgctcaccatctatctctatacaacagtcgttactagatacttctcgctatccatcactacttgtctttcctctgtcatcccacgcctgagaggctcaagatgccatactatgtccatatagcagcgaaaggcgctctcaacaacaaccaccttcatgtcctcaccaccgttagccgggaggctgcggactatttctaccgacaactgcaacagcacactcccttgagggcattgggtcatactccaattaaaacaacctactactcccccacattctggtcgatcgacccaacctacgacgataccatctcgttattgaacaatctcgtcagcgacatcgacaagggcacgaacgggcaaatccccgaggcagctcaaaattatctgaaaggaaaactcttcatcggtccccttaccggccagataaccgtcaacccgacctatgtttcagatgacaatagttctggcaacatcaacaatcgatgctactacatccgcaaccgacatacaccagagtgctggtttgtgtctcccggtgcagtcgaagtgaatgtttctatatcgaaccgttcgaaattccacgttcaaatttgccctgaaaatggagaacctctggtcctagtcggtggagatgttatccagctcatgttgatcgtaccggacaacgcacgccggtttgtgtgcgtttcgacggacaactactgtttgatgtgcttacccggcaacgtgacgccttcttttaagttccacttctatgaattgaggaaagggtggttcggtgtttctacatcgttatcgaaaccgggcagttctgtgcagtggacaccgactcactctctgagtatggaagggccgggggaggattgggtgctccttgcttcggaggatataccttgctgatgttgaggatatgatacatctgctggtcttgttcggcagtaggaatagactaagtcattatggatataggaacttcatctctctccggctgcacctggcagttcgattatagtttcatcaacagactagatacttggcttccagaacgtgaacgccattctacttgattgaataagttccaaccgaaagctgtaaagactgactgtgactggggtgttgtgcccagttgctctttccttgttacgtgagcgggcagctcctcatactcatagacgttctcaaatctcaagccccccttttgttttcttgatcataactatcagcctatttgacatcctttctgatatacacactcatttccagcaatgcctactccatccgctcttatggcaacccacaccgacgaagagtctactcttccccccaacaaccccatcactatcagcaccggtgaagtcctctctcttctgggtgccctcataaccctgaagcttctccacgctgtagtattcctatttcgccttgacagaagccggaaacgacccttgaaaagcccagtcactcgcgctgtcattcgcagagagcagcttattatcaatattttcttatccatcatgcccgagggagtcttccgctcgcccacaatcccggatgcaattgagttagcacattttccattggttgatggccatgcagacgagagtcggacatcgtctgacatgcggagccctcttattcatacctcaccttgtataccaactggatttcgtctgtggcagtgcggatcatgccgcggcgtggaagcttttcctcccagtcttcaacgcccagggatagcacatgcagcaagcgaaagcagcagtgcacagcagttactcggcgccaacgaagatgaagaacgaagaagtttatccgtcactcataccgagtctcctagcgtgaaccaggagagcgtatctactttgaacccggagtacactgcatccaggcctgagagacagcagttgagtcctgtcggtcggccgttatctatggactctgttgggctgcctctgatgaacgactcccctacgatcatgataatagaggagggatcaaggtcgcctcggtcgacggagggctattctggaaggtattctatcagtgaagggtcgtatggtaataatttgtctatgacgccgcattgtacgagaggtcggagtgcgacttcagttcggccattttcggacctgtgatattgcattattcttagcggtgctttgagtatctgcgttggtgctttggctgaacagtcattattgttaacccattgattgggtcgttggagacggacggtggtttttgttcattctacaagtctgtacatgctgtttttatatacatagcgctcgtttcaaggacactgttcctcacgaattgcatggttgaaatgtcccatggacttgacaaagatctgagcactctcaagcacacgctgtttgcaattgccgttgacctctgttcccataaaaccaccacggatatcatcgaaatccaaatccttaacggccctccagatattatgcacttcattcggaggcagaggtatctatacccgtcagcaaacaccaaacaactgatcacaaaatccaagaaacccaagaaaagacagaccatattaggataagaccacataaaagtaaaggacaccgtccccggcaacctcccaacatgataaatcccactcggcaccaccccaatcgaatccgcaaccaacaacacccccaacgacctccaccaaagcaccgaactccccggaaaatgccccccagtcttcacagccaccaaatcaccctccaccccaggaaccgacaaccgtcccgaatcccaaaaaacctgtctctccccggggcaaaccacccactctctatcctcccgcgcaagataaacaggacagtcgaagatctccgcccagtgaagatgcgtggtatagaaatgcggatgcgaaataactatccctttcagtccgcctagctcattgatcttggaaacggtctcgtcatcgatataggtgatgcaatcccacaggagattaccggtggctgtacgacagagaagggcccgttgcccgatggccactcttgggactgtgtgaatggaaattagattcttgtggattgtgtctggggtgaattcgttgtgatattgttttgtggtttggaggatgcggagtgttgtccaggattgtcttcagctttatagttagtaaatggacctgtttccttgtaaacataatacatgatatgtatgtatcggtactacaagtccctctcttttcttttcttttcttttggaaatatatacctcaattatgttcatggatagaaagaaggaggagagaggagggatatagatacccagtagcaggaataaactgtctcggatcgtcgcagattttacacgttgattcggatgttgtgggatactgtgttccgcaggtcgagcagattgttagatctagtgagttggacattttgagaattcaagttgtaggagttgttaggtggtacttgggtcttggtgtagtttgtacttttggggcttcagttgaaggtgcgggggaggcgatacatgtaccgtggttgaagtttattgcgtttggatgcgggggttacgtcactttactaatttgtgttgttttatgctgttttatgtggggtttgtcatgtttggaggggagattggtgagttggttgggattgttgtgatgtgtgaggtagggtagttaaaggtagggtagggtacagtagggctacaatgcaaagtcatgtgaagacataactatactgatacgttgaaccaagtgtaaccgatcaactagaagtaatttccctcccatattttctcaaaaatgagggaaaatattgctccaccgaggattggagtatgcaccgactggcaaactccggaggctgatgaaagcctcaattattaggtatagcatggagaacatatataagaaaaaaccactgacggctattgacaacaacatagatcgacatctggtgggcatccaatggggccacccatccctttttgttgagtcctgtgggtctagatccacctcatcgcatgcatcctggatcagcctccgaaatccacttaggaaattgactgtttggcttcgcaaactgccgccattcaaccgcgcttcataaaagtatcggagggtgtggggctcaatacccttcttcccaccgatcaagcccatcagtatgggaaacagccctactccaatagcagagagacgccacaataaacgttctgtcggggatggaaagtgtgagttccacgctattacatgtagaccagcgttcagaaccgcagtactggctgaggccaactctgctcgccaatcgaaaagcatggtgatatcataggcggcgcgaaagatcatatgggttattgagctgtgactcgtcctctctgtgatgaaatattgatcacagggtttaaattgagtctctgttccaacatcgtgttcctgcatcgcgtctccatccagtgggaggaaaatcggctcatcgacgtccaacggcttcgacccagaaagcgtatgcaacaacagcaaaggggatctggatggcaacatgggtttcaagaagtgtgacaggtagacctgcagagattcgtcctatgagttgcacaatcatccacataatttgcataaatacgatagctttggcgagattattcgagtttcccttgtcctgaatggtgtaatgctcaaaatacgacttaggaagacgactgtcctggatgcctgtcgggatggctcggttcttcagcaggtgaatgaatccatcagcgctgatggtagtaaccagtccagcaccagcatcttgcaatgcagatgaagaatttttgttgcttaagtcaacagcatacccccccataacgacaaaaaaggcgcctgacattccaagcagctctcggttttccttatccccctccttgccttcccaggcctcgagccaagcgcgatgaacatctaatgctttgaaatattgtgtcgcagccatccataatatgaaatcaggccaaacgagagccactaacatcagtgctaatttgtaatatgatcgggccaatggcttccttataggtacgacattgggatgtatcgctgtccatacacaaagaataagtgtacttgtacagctccagaataatccaaatgtacctctttgatttggttctggcatgtacgagggctcggtctggggaataagagtagcaagagaatggcaaggcaagagcaaggacaggataatactttggcgcatggtgtttgcttccgtattgagtatcaggaaatatagctgcgattcgatgaacacaaggtactgtacactttggggcttacaaggataaaagatttcctctatttatcatacgcagtgagggctcaatgcaatgaaagctatacgcagatgatgaggcaccggaaaaaagtgcatgaggcaaactcgcctcattagactccgaatagtgcaaggctggctgggtcgacgtgtcaaggaaaagcaatgataccagaagcctttgtttgattggctcttaaatgcagctgaataggcgctatatatgacagttcaattatgatatgtacatactacccaatgaatacggtgaggccgatctgctgagaaaatggtgctggataatgaaatcaatcgcctgagaactggaccatgttgtgagtagcaacagtttggggatctacagactattgaacaagccaactacaatttgaactgagagagaaaattccactcaatcaaataacgtcacgtaggagctccacttatggctgagctatacagccccacgcgttttctgagaaatcgtagcaatcccactgcaatgacaggtgtcttaggtcaaatccaactgaatacgtaccctagttcgcttctatgtatcactgtgggcacagaaaagcctgctggctgctggtctatttgttgagataatgtattatctatttcttagtgggtggtagatcgaagttgtttacctactagtagtatgagaactgggaagatcaatggatattaccgctgacaattggtgacctagagaagagagtattcagctacggtgagcaaccaatttgataaatatccgagttactatgctatccgacgcctcgtataggtgggaacaaatgtttatctatatctaatgtgaacctcacaaaacctagccatctgtgcaatctacaacaataaacctcacaatccatccaatataggaaaatcaccagctctcacagtcacagacacacactatccctaaggtcatcctctactgccccccaagcaccggaaaaaacccaacataataatccctcttccccaactccaccccctccttcctcagaatcccatacgcagtagtaagatgaaagtaaatattcggcaaagcaatactatgcgcatacgccgctgcagacatctcaaccgccgtctcaggccccatcggcgtcttcgcgacaacatccgcctgccgattaacgacgtccttctcggcctcgttgagcgccttcaacaccgtctcaatgcgctcatagcactcggcaaatgtcgtcggactgccgtcgaacgacaccggctctcgaccggttagtcgtgcaaccaggttctcggagaactgggtcgtgatgcggacttggtcggttagggggtacatgtcttcgtggagacgggctgtgaggagggcattggcgttggggtgttgggaggcgcggtggaggatgtgggagagggttttgaggatggattggagtaccgggatggttccgtcgtagaatgtgtgggccatgtttggttagagtgggaggtttagtctgtagatgtttgggaggtggtggttgaaactgagggtcgtatacacgacttgtgtgggattgttaaattgggttctaatgtaagatgggttgaggtcactcgtgtttcttttatattgtaagatcttacggcctatcacaacacaggttctgaaacagaccgaggggtctttctggatctaactatgcgcagttaggtgtgggtcttggcattgggggctgggatatattatggatgttggatacaggaggtatgtttacttgagttactacggatagttaaattgatgttggctcggctgaggtcccgtcgtctcgcttccgggggcctggttgaaattgcatgtttggcctacatcggatttatgggttcttaaagctgctctttcgaaggctagtgctacggcgagagacgattagatcgcttgtataatgaaataatattgaaaatggagatatagttatcaagagcgatagataccatcagtaaatattacgataaactgcgttctccaggcctttagacctgtttcgtccaagagtagagctcgaagagactgggtatcaaaggatacttgaaacttgactgtgaatatatcattctggtgtcggtattcaccttgggtcgtttaatgaccagaccgagtcaaagcagcagctggactatacaaagaacgacgtacttgcatcagctgtttgattgggtccagcagttcaagttccatagggttgatacaagtatcggagaagagaagagatgaatcaaccatcgtagtacggcagttgcgtattggttgagtagaggactatagagaagcgggtttcagggattgcaataataataaggtatccatccagccgtcaagatagcaggagaggaggatgaaaatgtggatttaaagcaaaggtatcaaaaaaagatagtgacaagagtgggattcgaacccacgcgtcttgcgacatatgaagacgaccctattttcaagggcaagcgatagcttgagtcatacctgaggatactgttaatggttgaccaattgagtttgtgtgacgacaaagtacttacaccttaaccactcggtcatcttgccatgttgatgttaaagaaaactaaattatgttatatatctgaaagaggctttagcaataggtatcaaaaaagaataatgacaagagtgggattcgaacccacgcgtcttgcgacatatgaaggcaccctattctctagggcaagctgtagcttgagtcatacctaataagataaggttaggtaactgctagagttacaatatagacgacgtcggtacttacaccttaaccactcggtcatcttgccgtgttgatgactaagttatccgagttaggctatctattccatacctcatctagtgatgacgcccaactgaaaaagtcgttgaaatagaaccctcaaaggactagtaggatactcaatttgatgagataattcaatacaaaaaacgataaactaagttgatctggttattcgactgcttattctaaagatataggaaaaacagaaagagctggtggaagaacgcaattgattaggtgttgaattgagcggtgattacttgccaatctactaatcagggtagaggacctgtcaactaggtaaggatatgtaggcaaagcgctaggcagtagatactagagacagaagactgattcttgatttactctactacgatttccagtgctaatttatagctgaaagacccctaggattctttgtatacaatattcccagcaggggccactgtgcgttattagaaaggcaacgggtatagtctccgacgtcgccgatcggccaccgagttgttcatgcacatgggacagggcatcaggtacagtcaccttgcatgatcgctatcaaatctgtgacaagaggtgtatgtaacaagaaaaacacagggaaaaaaaaagaaaagaaaaagaaaaaggacactcctgataaacacaggaacatctactaggacgggtaaaaaagattgacaagagtgggattcgaacccacgcgtcttgcgacatatgaagtaaccctagttgtctaggacaagctatagcttgagtcatacacctattttcctgttagatgaggtcgatcgattgtgtgagggcagtgcgaatttaccttaaccactcggtcatcttgccttattattgccttctggttggattttgcattcaaatacggctactattatacaacccaaccacttccccttaagaaaagggacagtacagcaggcagaaaagggctcatcaacaagacacctggaactatattaaatcctaattcaattaggagggccaacttgaaactttctatacacggagttctaggagagcgactggtggtccaataatattctattttattatcacagacgtataaccatctgttatatataacaatgcttcatgcaactgcgacgtgatataccaaagactctctaccagcaattagattctgaatatcaatgatatattcgaacgtatcctatactcgcacctttagttaggctatagacggttttggcctaatatatgcctgtaagaattctagttcgaccacctacctaactaagccttgcgaactaacgtctacagcaatgagaatgctacgtattcctacaggctaaaatctgaaacctttaagacattgtccagatgcctgggactctcaaaagctcactctaaattgttgtaattataggagtatatcgagagtctcccaaatctcctttgggtaagtacggaggaggtaacggttctgcggttatccatatctacacaccttcttctctctctctctctctcttccttttttttttttcttctaagtatacgcttaatggtttattcttaacaatcgaagataaaaatagcctgtcaccccaaaatgtccattattggagaattcaccaaagtatactacctttgtttatgtgtaagccaacggcctcatatatatttagaaaccacattcactcctagatagccctacctactcttggtaagcattaagatgatccaccgatagtgaagatttatatttccacttctcacacccccgggtcaacacacgataccccaacccatatgaccggcctgtatctgtctcccccctcctgaggacatcgaggttattcgcttactatatctgagtgtcactgtcaagagattccatccttgtaaccgcatcaagtacctcacctgccatcttccgggtgttcatcgtagaaccgcaagtatggcagcccgattggaagaggacaatggcgtgaacaaggaaacatatgagccggataatcatatacctcccccaagccggtttatctcagtccagcaacaggagtatcaagagaaaattgtaaccccccctttatctcccacatcattaagttttgctctaatgcgcaacccaagttgcaaatatccgtagactcaactcacgtcctgaacgagccactgactagcctaccatcagaaaactctctctcacacgacatgcgagcattgctacgtgacatcagactcgtgatgcgcagacggcccgtcgctaccccaagggtcctgaagaatctcactcgggtcccagatcttttaagtctattcgaagcgcttccttactgtggctactccttcaaaaatgggccctggaaacatgctcttgtagcatttggaattgacccaagactgggacctgaatataggatgtatcaaacttatgaatttccgtggaactatgaccctataatcgcggagccttctgttatatcacccctaaccgtcgaaatatcgttcccaagagtggttcgcactaagcacagcgacaactctcacgtttttgacggaaatttactatatacagatgacaatatctggcaatattgtgacatttctgatgatcaacttcatcgaatctggtcgacaactacaattcgtcactctttctgtccccagaatggatttttctataacggcacgaatgcaaaactatgggaaatcatgtctgacaaagttatgaccatacgagatggagaagagcctgcagtggatgattatgagtgtctattggacatcccggacgactacaaaggtggttcccgtagtggtgatcgcaagagatatggccaaagcttcgggcagaactacactcgcaagcaagccttcatgagatctttaatcctgaaaaaggcacaatctctataatataggtttatccactatgtatctagttgagatgcctcgtacagcacacaatactaccagatccatttctaaggtgatgggtgagttttcttagtgaatttagatttcaaggttcattgtcaagtgaatcacatttgactgcttagtgaattggctctaagggcattcagttgactagttctacctttcaaacagaacctcaaacagaacctctcattgtctcccagcatcagcactgtttattttcttattcatcctttcttttaaaaaccctcccacaccccaaccctgtgataaatggtgccctcatatttccagtctttacccaaggatatactcaaccataagaacataagacagtcgagctaggcaaccatggtatccagtacccacaagaaccataccactgagaaaaatgaacaatccatggaaaacagcacaggtgataggctggattcatcatccaagtcgagacagagctgggggcgttcgcgagctcgaccgggctaccaggacggcacccctgcactagttgagcctctcacagaggaacaataccggtcgctccagtgtataggtaaccagagaactgcaaacaggatggttcggccaagacgtttcacatatacacgagaagagaagcttttcgcgattcgctattgccggcaggctaggtcgctaaacgttgaaacctcgagatggtatccaattaacatggaagtagcaactagaaagcttttggtcgaggagggcaccttgaaacggtggatgagagaagaggaccagatagtcgctatgcctcctggatctaaaagagccgacaaacgtcctcgggttcaggcaaagacactagcagcaccacaacaaggtacaagagagacagtatctggcgatgagggttcattcgaggatgagagctccctcgtcaatcacaaattctcatactatttgcagttaagcccaaggcagctgagggatatgttgagtttgacagcatctgatcatagggttagtccccaacctccctaagaattgacacaagttgatacatgtttcgtctagctccatacgttccaacaccctgttccctttgttggcatcgaaggggggagagtgggaaagctgtatacatttcaagatgcatataactttttagattgtccgaatatccattctcatccaggccatcctcttcctccgcctaccgtgtctggctcaccatcaaaggagcgaccttcactgaatatccacgccgagagcacatacacgagtagggcaggtgaaagcaatatttctactcttagagttgtcgatgttaataagcaactttacgaacttgcccccgaatttggtgtacgagcgccaactggtggttacacgggctcctatgcgtcagttagaccctgttatgatgaacttaagtactgtgttgcattgatttgccaaagcatagccacttcaagtagtaaggtgagtatagaactacgggatctaattattcttatatgagccataatttgcatctgacactggattcgttaggtgacttcagccctccctgtgcgcattgagctggactatgattgtccatatcctggggccccggctcagtgggctgtacttctctctttcggcgatgaagaggtactattgcccttggcattgtcgttgtggggtcctcagactatgaatgcatctaggccaaacatcttatatcttcaaggatggacaattgaccacggaatccgaatatctccacgagaattcaaagtaaaagagtactacaagaatatccaaagactcttcgaggcatttaggtatagtactgtgcttcacgtgatggacgttgaaccgctcttcttacgggctgaagatcgctggcgcccacggagatataccagcacatggactctttatacgactccaattcatgcgaactatgtgtgctctggattctacagccctatccaagggagattcatggatattgaactactagtgaataacattcaccggtggggctcgcgggttatatttacgaaggatacaacccgaaagccttttcagcttctgaggctaagagactttacattacaccggcctgcatcgcaaccgtacgaccacctctactcactgacagagaagctagtcgagggtgtgaggccacagggttcaaaggcaccgttttctgatgaagtggacactttcactactagtgaagtagtgaaagacggagaaggcatatatatttcgccacatactatgcttcaatcacgggagcctgacagagggactgatggtgcccgtgatgtgacagattccatcgctgaaccggaggattttgctgatactactgatgcagatgaggtgggcgaggccacaccatcaagtaatagagggcatacgaagaaaaagcgtctctaccagcggtcttcaatgcaacgtgcagtcctcaaaaattattcattggttgatggcaagaaaaaatgcttgatcctaacttgtccattaccacaggagctgtactctgggtattgcaagcaccactcatcaaggattatccaatatgtgtcgtcattgaaagctacgggtgctgaacttccaatgccacaatgggagttgaaacttacggatgatgcaatgactgatgtcaaaactctttcaacaagctaccacagaagtcctcagaatacctgggttatcgactttgagtacatctctctgagtggggatatgtctccgataccactccagtttgctatcaggcagcttgacggcaagctactgtttgcagagaatgttcactatggcctgtctcttgaagatttccttgtcaaattaaaaacttgggagaatgcggacagacatgtacaagttctatttacacattgctacggtgacatcgtgacgaatggattgaggccagacgagatcagggatgaaataatccataatctggactatagtgcagagagaatcagcatcatttcatggttcagtccgcaggatatgcaatgctttcaaaggttgctcccgggaagtccagagctaatagttcctaaagaaagccaccacctatgctcaaactttcaaaacattgacgtgggaagactgctgaagaagcttctccctatgaactggccctctctgtctttaccagcggttcacagtagctttcttgcaagccagggaagatccggagacaagggcgagtatcacactgcagcttacgacacagaggccgttacagatatagtcaaagagataacaacattgctacaaggatttggcttctagggaaatagaacgtcttcaatatgaacctacgttattgaactgtattggaagtgactgtctctatcacataggtaaataaaatcaacttcatgcctgagaagatttcacgtgcgagcagtgtaggaggttccatattgcgtatttaacaatataatatattcagagctgtggttcttgttgcatagtaaataaagcggccccagacacggatgacaataggactggatgtattcaattcctgtggtaagccgctttggggttttgctcaagaaaccattttattggcgcacacggaggtcgcagagggcagttgcatatgctagatcaagtactggggtaaaattattacacaggcaagtctatacaagatccccagatattcacaacgttgccaagtgcctacatgcaacaaagaatcagcaccacatgacatccaacagcttcattgtagtgtatggataatggataatatatttagtacagtcaggaaatcagtgagcaacgcaaaggttctttgtctactacattcaccacgctgatgctatttatggcgtcgaatgtccttcgggatagcagaggtagccgatttaaatttctcaacaactgtataaattgctgctttttagtatttccgaaatctccgcactgccaaaccttatcaatcttatctccgccatttggtcgaatcacaccacattgaaacaacctcttgaacctccactccaacgttcccctctcccagttcgaatgttcaccccgcggcccctgccgcaactcggacgcatcatggcctcggttcaaaattactcacttcgtcagcgacgatttgctcctcttaacccagagagaaaaggaacatcaagtgccccaccattgaagggtatcgttttcgacgtggacggaacattatggtacttgatactttctctgaaccatgtcacggtagctcgctcggatggctgatgtgtaaacagtcttcctcagaaccacatgtttgtcaagatgcggtatgtggctaaaactcgatatcgttttacatcttacgtgatgtgcactaaatcctccacagagagtctcttgggatcctccacaaggatatcgatatcttgcaccatattagcagtctcccaactcccgagcaacagctcgaagctgcagataaaatcaaggccgttgagcaagaggctatgcaaacccaggagccccagccgggactagtggagctcatggattatctccacgaacggggagtcaagagggcgctttgtacacggaattttgagtaaggcgttttactccatcctatttactccaacattagatgtacgggagtgagtgaacggtagaggttaatactactgtggcagaagaccagtacggcatcttctagataatcatcttcccgctcacgtgtttctgccaatcgttacaagagagaccccggggttattgcctaagccggatccagcggggattttgcatattgctaacgaatggggactggatagtcggggagagaatttaatcatggtgggtctttcttttgcattccaggtcattttctcttctctgggaactaatatgatgctaggttggtgacagtatcgatgatatgaccgctggccatacagcaggcgctgcgactgtcttgctcttgaacgaccacaacgttcatctcaaggagcacccccatacggatctgtgcattgagcggttagatgagctcatcagtatcctagatggaggttttgtcggaaaccgtggtggtgacaaggttcctaccagtgactagtaggtcggcttatgccatacctcgtcaccgatgctcgacagccaccggtgtgcctagatccaagattagacaaatagtccgaaccctcttggctcatgtaattcaggtggcatgctgctgttcattgccacggcccgtgtggctgctcgtatccgtcgtgtttatgtacagacacagttacctcagtagataaagacctgatcaaaaggtcaggcacgaggttgtaaatacgccaggtggcattgaagtgcatgataagtgcaatcaacacaagaaatatgtatgttagccaagggtatcatgtaccaatcaagttactataggcgccaggcgtaaatgggatgtcgcaatacatacaaccagcccagcaatcacctgcgctgtattagtgacctatggatcagagtctatacttatcccaagcctttttagcggcactcggcatcgggcggtaattgtcgccgttaccccctcgtttattaccattgccacgtccgccacgtccccggccaccgcctcttcccccacgaggaggaggcctggactggcctcgtggcggtgaacgaggtgcaggttgccaggtatccttgcctcttccgcggcgagggttgggggacaaggagcgctggcgtgcgttgcccgaatggaaatcctgacgatccctgtaaaactgacgagaatccatatctgggcctcgcgagccggccggcgctaggttcttgttcttcccaattccactaccaatccggatattgcctcggtttccaccacgacctacgggccgtcgtctagtcatcaagtcatcgctgtcatccggagaggagtgtacatcagcacggcccctaatcttcatcccacctcgacctctagacgaaggtccgcccctaccgttgaccacagaattgatattggtaaccatattcggatcaactcctttcaacgtccaggacgaagatttcaaaggttgcggaagggatgggcagtcaccgaccaaatggtggctgctggtacaatgagagcaagatatggatacaagcacgggcccggattgcggctcttgccgatgagctttccacatgaaatcacactcgagctccatgtgagctgaagatccacacagatcacagggaatctcagatgcggaacctttcaggagcgaagagcaatcgcgctggtcgtgaccacgctcccggcacttctgacatcttctccacgaaggacagaaactgctctggtgtttatcccaagcaccgcaatgcacacactataagcggtcagtacccactgtgtccgatgcagtgcagcaagctccctggaaaagcgggttggtagtttcagaacgcacctctttgtatggacacacttcagcaagatggccctcccgcatgcattcaatgcaggctactggtaattgcaggtttatgtcattaatctcgcgatcgtagaagacatacttcgcttgggcatccatatcttcacgattaagatcagcaagtgtctcggggtttgtggggtatttctgggcaaagtgacggaatgcctcctccttcgaagtcgtcggagaaccatctgcggccccgccaaaggtatgtccattggtaatactttgagaaaccggaagagactctggatcgtaatcatcgtcctgcaccccgttttgtttctgactagcgttctgtgtctgaccacgggcattgatattcaatagtatcgagtcgtcggcctctgagtccagggatgaatcgtcggagtcccccgatagatgcattcggctagagtcagaagaatcatcttcctgtacttctccctcttctgaggcaccatcactgttggtctgtgacacattatcgttgtcgccaccattcgaaacagattcgctgcgactgcgccagtatttatcattgaccgcatcaaaccgagaatcatgttcgccctcatttgccttgtttccccgtttgttcagtgaagtcctgatggtacttttactggccttattccagttgggagccgctgcggattggggcccagcctgagaggaagcctcgtttccatcatccgaggaattggattcatcatcgctgcttgaggagccagagctggacgtactatccgggtcgacctctaatgtgtttgcgctgaaggtggcaccttgagggacaaagtcgcgcgcatctgtgggctccccctttccattccttcgttgtcttttcctggggtgcgaattgctgtctatggagctctgtcgcgagccattggtgctggtggcacgattgcgctgtgcaccaaccgaggctgttctagaatcgttattgtcatcacctggtgagtcaggcatactgtgatcaaaagctgaagggcagacaaagctattagaaaacgcgtgaattgagaaaacgattgcctgaggtggagtgttagtttcttaaaatttacggcagttgaaagtgaccatcggtgcagtatcggatagaagaacttccgcccggcagtacatttgatgcatgtttagtagtctatcgctctactggtgtatcggaaatactcaataccacaggcaatttcaatgtctatcaatcccatagggtctggcggagtgaatatttgtggagaataaatggaataacaagtttatcgaacaaattccttggactattgaatagttgagctgctggtgagataaaattgttgtctagaacaacccggtgtacgcaagttgcagatgttaaactactacgaagtctcgatcattctattaatatttagctagaagaaagatagatcaaaattaacttattcatttgttcttcggttgcttctggaccgtctcggactataattagtaggggtttattccgtaccttaccttagtattggtattattgttgtcttttattccctttttgccccctcttcgttctacgattgaatatcctacttttatatatcatctttatattccccaaactattttcattgtttttggttctgtatcaagtcgttatagcagaagtctatccttgtgttcataaatccctggatataattgccactctctttatttaccatattatctttttttggtgacactgaatttacgttctgcctaaaaatacccccaattcatccattttttttgccccccctcggattggcgaacatcccgtgacccaaacagctgccgatcatccaatctgacggtcggaagtgaactgaaagacggatcagatcctctgctacttctgcgttagcaaacaacttacttacgtattagctacaagtgtgattccaccccgattggaactgtcttggccgctcttttttccgatcctcctcccaatcaaccctcttcgccttctcctctcccaccatcttccctcgatcccacggtcttcccccgttcaataccgccaaagtgtcttccctcgcagttccccgtaccatttccttccccccgggggtggatactcaaccgcaacggttgagtccggattccagcatgtcccagaacaagggtggacggaggagacggtcaagcagcatcatttaccaggagccgccggaatccattgagcgcaccagtgaccaggccgccttgcccaatctaaatgcgaattgggtcaatgccaagggtgagtgcatcgacatggactctatacatgcataataatggtgccggggagctaactggagacgtgctcatgacaggtgcctggaccattcatttcgttttaatcattgccctgaagatcttctacgacatcattcccggagtctcgcaggaaacctcatggaccttgaccaatatcagctacatgttcggctcgttccttatgttccactgggtgcggggcatccctttcgaattcaacgcgggtgcctatgataatctcaacatgtgggagcaaattgacaatggagatcaatataccccgacgaagaagttcttgctatgcgtgccgatctgtcttttccttctcagcacgcattatactcattacgacttgacgtatttcaccatcaacttcttagctactctgggagtggttattccgaagcttccatttgtacgttctccttggcccaacggtatctatacccatgtcttgctaacttggccacagtcccaccgcctgcgaataggtcttttctctcccgaaccagaggagtagatattcctgtttctttctctatttactttcctttttttttttcttgataatattctccacttggcacccattatccttcctttctctgtcttgtaataattgtttcatgtttcaggggctacccccgttctgaaattggccggaactctgctattctaccctgtcagatacttttgtttgctgggaagcgggatgaagtgatagcatggagtacaggaggcatcaaaagcgaagagggacaaaagaaccaaaaatgtcgaaaaaaaaaatacaatagaatatggggtcgcggaaatctttgatagaggacaggaaccagctgttctggctcttgtaaccacgtgtctagaactaagggcatttgctacttgcatcttacggtgtatatgggttttaatctatgaaacatactctcggtgactggcttcgcagcctacacattctaccatctgcacccgtacgcaacagcatgatcagaatgagcttaacgtaggaattgtttttgcaaatttttcgaaactgatgtcttggcttatgccattttgggcggaaattacgtctattgcattagggtcaatctagatcatgcagctctgttgggtcacatgagggatacagcaattaaccctatattggatgctgattggatttgttcggaacctcggcttgtggtttgggttcgtgtgcctagaagtggtatgttagagatggttttacattgccatggcgtcgttggcgatactataaactcctatctaccgtttcgattaggggttattcatactagactatctaactcaagtccggtttacgttaggttctttaattagctgaccatacgtatgtaactggggctcatcttcgggctgtggagttgatgggcgggaccggtcatcgttgtgcatgcatggcatctacaggtttgcatgaagtattggggttattgttggtatgctacccgctatgttagtggtcatcattgccattgtgctgcgtcggtcagggaattacttaatatcgaatactaactatctatgcagtacaggtaagggggatcacctaattactagtatatacactgggcggtagtattgactcccttacaacagaaggacatgtatatatatctctcggctataatatggaagaggtaaatcaggaagatcccttgttacactgaattcccttacgaacggaaaattgatctaccatctaatcgagtgaaaaaaaaaaaagattagggctatcaatataggggctccaatgtgcaaaccaccccttccgtatgtatagaggacaaaaaaaagggggtagataagaagataacaagaatctgagaaatgcaaaaaagaaggaccaatcaagttatctaacgccattggcgctgctgggaatcgaacccaggtcgattcggggctgtgggactaaccacaacgaagcatgataaccactacactacagcaccttgaattggtgattatctgttctttaatttagaatatatactacgtagacattatatacttcacgctatggtaatatactgtgtagatcaaataacgaagatctgtttgatttttaatgtaagccaggtacttgaaacttgggatacaatcggtagattgatatccatatcaattgtgaaacacaaactacggatcaatgaccatgaccagggtaattgttattacacgtggttgtcgcatatcgataagaagtcgcgacaccgcgattctcagccttctacaacatcacatctctcaaccgacaagtaaacagctcagtcaatggcagtggcagatgaagaggcgccctcgcctctctatcgtcatgccaggacacttccctttgaactggtccaacatataggcattttcttcgaagagaagctctgtccgcctcccctcactccccgcaattcacttgaccatcgaactgaccgcggcgtccgtcaaccagacacgcaagccctaaacctactcctaaatattatcaccacaggcacgatccctccaacgccagtctacgtcccgtcgccccagcatctcgccctcgccgctacattcctcgtccacccctcaaccaccacccgggccaaaaccgccgagcaagaagaagcctccaatgtctccctgcgactcctccgcctcgcaaacaccatcgccggaccagtatccgccaaactcggaaccgcattctccttcacccacttcgaggcctcccgccatgggcgccgccgacgcgccgaagacgagcaacccccagacgatgatacgaaaccgctgaacctcgacctggcccagtctgcctccgtatggtcccgcgcagaggacttctggcatgcagtcggctgggcattcaactgttccgtgcttcaccgcgaacggtgggagaaatggcaaatctggctcgaatacatgtgcgaagtgctcgaagacgactggaacgaacgcaaaagaatgagcgaccgcaacacaaacatagatcataaagtcctcaaagacagtctgatcttccgctacatcaccgaaacaacagcaggatacgggcgcaaccgacggatcctccgcgcgatcttcgcagacgggggctcgacctctgtcaacgaattccgcgaggtcttccaccacgagctcaaaaagcccaaacaagacaagaacaccaagaaacgcgaagtccaagtcaacatcgacgaagaccaatatggcgactacctaaccgacgacgacgatgactcctccgacaacaataacaacaacaagaacgacccagacacggcctcaaaacggcctacccggcaaaccaaacgcccccgacgaggtacccgcgccaaagacgtcaaatcagccgacgcagtcgataccacgtcaacagtctacgcactcagcgatgtctcctcgcacggcggcttccaatccctagccctccgccaacgtctcctccaccttctctccggtgtcgcggaggctctccctgacgacttcatttccctcgaggaactgtaccacctcttcgtcgaaaacatccgccatctctccctccccgtcttccaggctctcgtcaccccatcaactctaccctatttctccccagaggcgtgcacaaccctctgcgaatgcctgctcttccgcatccgcgagagcgcagccccagacacagacgaggagtatctcagccaagcaaagctggaggagtgtttcctcccttatgcggcaagtaccaacagcgtaatcgacaacaccaagatgtcgatcctcctcgaggcactcctgatcctactcgcaaacagcgacatgctaaaagtaactacggacttgcaagaagcggtagaagagggtatccagcgtcgtgcggagaaagcccaaacggagacgaagaagagcgtgagtgcgcgcaaatcggaagatgcggagtggtgctggctgcaggagagtggggagcggttgaggttccttgttgaggttcttccgcgtggggaggattcggattgatgttagggttgggctgtttgggggaaaggttgtggtggattctattcattgatgggcttgagtttggcgtatagatacccttgttgtctgtgtgcgtttagcatgttaccaatgccctttgttggtgtggtttagctttcttttatatcttgattgaatgaactattcaagctgctcatagcttatctatagctagccaccaagatcttggaacaatattggaatcaaactctaaaacacgaataaccgccgtcaacggggtaaacacaaataggtataaaggatttgactgaaatactacccggatttcaacatatgtgatcacggaggaggacgagggccaataatctgtctccttgcgcctccaactcccaggccatggccgccccgattctggttgtcaccgcccatatagccgtattggtgcacatcccaggctccttgtcctggcccaacaccgagattgccatctcttaggccgttggcagcggcctgttgagtttgcttttggttctcctcccactcacgctggcgctcgcgctcgcgctccatttcacgttcgagcaatgacttggaggcccatccgcctgctttggtcttttgctgtgccgctgcgcggcggctattttctgcgtcaacctcggcagttgttgtgtagtcttgtgggcgatgagtggccggcttgggcgcaacgggaggtcgattggatgcgaggaagcggtctacgcggctttcttgattggcgggtttcgaggcatagagcgttgggtccggaaggggccgaggtgatgtagcgaccggctctgggagtggccggggtggtagggaaggaggggggttggccgcttcagcaattgattcttcggtctgatgtttgttccactccgtgcgaagtagacggcgttctgattcgagtgaggagagattgtagctgggcttaggaggtacaggtactgggcgaggtgcaggagtcgcagcaggtgcggcctgtttttcttgaatctcctggcgctcgcgctgatattctgcctccctttgcttagcagtctctaactctcgctcgagttcccttatgcgccgtctctctgaggattcggcgggagcttggttcggtcccacttgactcgcttggtattgactgaggaactgtccatttaggcgggtatcattgacttcccgacggcgcagcctctctttctccagtctctcctcggcctctctctcctcgcgctggcgctgctcctcctcctcttcccatcgtcgctgttgatcattccattgcttccgctcttcctcaagcttgcgtcgctcttgctcctttagacgggcagtttcctcctcccatcgacgctcctcctctgctcgcgcgcgcgcttcttctgcctctcgctcttgacgtctccgctctgactcctcaaactccaaacgctggcgctcttcttcttcacgtctgcgcttctccttttcggccagactcggtacatttggtgccgcggtcgtgatctgtcggcgagcaccaaacgccacaccttggttggcttgactggcaccgcccatatagccgtattggtggatgttccatgctggcatcgtcgtatgctcatccgttcttttgctccaactgctcaccgggcctggagatttggccgggcttgagtatccagaggcgctggagtttgcgttactgagtccccgtggccgagagggtgtatgggcaccttgactggagccggtcgcattggggcttagagcaccaactttgctttggggaccaatcgagcgggggaatttgccgggttggagagcattagcccttctactgaaggccaccaaacactgcaggacctgtgcgggatccttggcctcataaagatcgacagtaaggaaaacatcatgcggaggaaggctcaggggtgcgatttgacacgcgcgaaggaagtgtgagatgttttccatttggacaaagggcatagatgactgcttatacttgacgccgggggaaacggcaaggttgaccaacctagggctatgttagtacgtcgaattgcgatgagagtatgcaagaaatgtaattatcaggcttaccggcacagcgcgacgccatctctgagtgcatctagaagatctccggctggtagtctttcatggaggacttcttcaatccagctgcggacttctgcggcagcctgcggggtatagcgggacaggcgcagactgcgcaaatccttatccagtgacgtaacggaagccatgtttgagattcagataaatctgaaacgatcggtctgtcgtgagtagtcgttagacttctttctcactacgaccgacggatgtaatcgactgtttatgctgccagccgttggtatgaaccgtggtacgggaacctagggggggcggaataggaggcggtgctcctgatataaaagaggcaaattggaatggatctagaatcgaatagttcggtgggttatatacagagtagcgttcaaatggggaagaacagaggaaagaaaaaaaaggggaaatataagagagaaataaaacacagagtagtagtatagtgaattgacacaaaatacgatatacttgttcataagtaagggaatggaatggaatgctgttgtcctttccttctcctgtagatcgactaagccgccgcccataccgtgacctatcacagccctgccttacccgatgacgtccgtccttcaatgaatcccttcggtgcccaagtctaagccccccgttcaagtcaaggtggatgacgctgcttcaatttccccattttttattctcatattattcatagctgcctgattgttcctcttcttgatcggccccaaatgagtccggtaaatagtctgtggttcaagtggaagagccttcgattgccgtggcgaaaatctttcctcgtcggtatgttcaacctgagcgttgctacctagtcatcggcaatgtctcaccctaaatgtctttgcaacaggaacggatctctccggaaacacattctgggaatttaaagatgccttgaatgctgcgcgataccgacggatcgtcaagttcaatcctaaaacccattatgcggatgtccaagtgagccgtaagtacttccttttctcccttcatttactttactctacctcccacacctccgtctcgtcaagaatatggtagagaatcaattaatgactgacacaatgggaattcagcacaatggcaccaatggctccgctacgtccgagccgaacccccctccgtccaagaacaacaacaagacgtccttcgccagattcaaatcaagcaactggcccgactagccgatgagcgctgggccagcaaggcttcttacctcgacatgccacagaacaaacaaccagagccagcaactcaaataacagatgcgaccacgaatgcatccgcgcaggccagcaacgcacatgaaaatactgcccctacacccgaaaccaaagaaacggaccacgtcgagacaccagccactaaaaatgatccttgggctgcagcccgaggagctcctagccaggactggcagccgcagtcctggacaccgaaaccgtctcagagatgaagttgaagacgggatagaaattaagattgtcgatctttatctcgtcggtagattacacgcgccattggaaggattccgcttggactgagcgccgtcaattcgaggcctggttactaagtggcttgttatgactcgaaattatcagatagctttggtttcaaagctgtattgcgcttttctcccgtcggagaaatttgggtgcaccacttggctatatcgtctggtggtttgagggaaaggatgggctcagggccattcttggttctggacatgctgaccttgtccgagtggttcgatacttcatattaattattggagtttgaactggaaaatttgtacttcagctatgtattttatgagatctatggccctctttttcagtagggttgaaaatgtgtataatagttatgctacggagtatctagattctagaagggctttcttacatatcggtgtccaccatgacattcgtgactctcacctgatacttgatccgatattatatataacaataaattagcaaagaggacttaagccaacgagaagatcagaaagatatattaaagaggtatggcatttgtagtacttttggagactcgatatgtacatcaaggtggaatacattatgccagattaggtttaggtaagacggcccgggagggctgattaagatgccaggaacaaatctaacgctcaaacagattctctctcagtgttttagactccggatccatcagaacaccgaacagaccgactggaaacactcaatataaagtaatataaggacaaaaggtatatggcagaaataaatcaaacaaacaaacgggattacctccagttttcaaaacattacagcctcgagggcctccacatctccaccggctttccgtactgcattaagtgcggcttcgctaatcctgcgacgccggtcacgggcctcttgctcccgtcgcgctttggttttggagctgccactgggggcaactcctgtgagaattttttgactgtcatttagcgtaaagtttacaaatgaaacagttaccgacttggctcccttggggctccccgatccattaaggcccttgacgggtttggggacattcattgagttggaggaaatcttccggccgggctgacggcgctgagctttcatggtgatgctgtgatgcatggctaatccgttcttgggggatcgatctgctcgcggagacagagatggtgaccgcgattgaggatgaagctggggagttgcaaaggaagatgcgtcaacatatttagcgtgagcggtaggcacgtggctataagtgtggttctcctgacaactagacgccgtcggagccatggtcgttgaggaaaatgatgaattggcggtggcggtcatgtcatacgcagatggatccatctggatcataagacccccttgcaggatgtcatgttgactattggccaagtcatgctgatgggtggtgttctggatcggctgctgtggagggggcgacgcgactacttgttgataggaaggttggcgttggggcacccgagcattcatgggtggccaccaggcctgagcatcgtggctctgaagatcaggcgtgaacagcccgggagtaccgagcgcatcggaatgccaggatgacatggactggggatccgaggaatgcggggagggaaagatgtcgtctgctgaagggggactcgaagtcacagtggagttattggagtggtttaaataccgggcttgttgtcttgataacactcccgtacatggcgatggcatggatatcgcgggagatggggtgaaaatgctagtgtcaaagtgatgatgcatctcggtggagtctcccgaatgatggatgtgtacggcgctgttgtcggccgctatgttctcttgctgtggcaggatatctgacggtggcggcgacagtgggaatcgatcatcagcactacggaggaaattcaagttctgaagtcggtgcgcccaagcttcttgatacgccattcttcctttctggaattgagaaggacgtgtcaggctgggggagaagctttgtttgtgctgcaaaccacggcgaccattaggttcgcggtgacgttggatagacttcggagtgactaatgcactttttggtttacggcgtggagttcccgggggagttgtcggcgaagagcgggtctctgcagggcaagtcgtcgaagaagcttcaaggttgacgtttagatctgaaacagcagagggatgaacggtgtcttgaaatgcaaggggggcttggccgagagatgagggtgcgtctggcggtaggctccagaaatccttcgcccactgtggtgaaggatgggtttgttgtttggaggtggagatgatgggtgactgctcgccacaattacttgacaatgagtccagcgaaaagaattgatcaaagtcgctagggaatgaaacgtctttgttgccgtcggtactcgagccatcaatattgacgtactgactgaataaatcatcgttgttgaacgagtggtcgaaaggttgtgcaaacatgttgtcggatattctatttccgtttgcggcgatggtggttccaagctcagctgtcaaagagaacgtttaccaacaaattggtgggcaggaaccaatctgattggcgaccagcgtatactctgggtcgaagggaactgcggatcctttagccggcgatccgtccaagagcttcgattctttgcagcgaccgatgttggaatgtttggtgtgtaggagtggtttgatggattgacaatcaaagaaaacactgcagaagatgcaaagaagacaaagaaaacaaacaacagacagagggctgtatttgaatcgttgcgccggggacccagcctcttggattctacacacattccaagtgctctaaagatgggtaaggaatgccccagaggggggatgggaagctctccatatggtccacccttggcccattgcttgacctgaatgcctgagtaccttgctccgaccaatcacagaggttggaaaactgggtggctgattggatacctcaagagcttgcccacattcattgacagagagaatgctcggatgtccccattagccacttggtggaatgcaacccttactataccagaaacagggtgtgtagtatcagcaggacagtcatacgagggccccagagagaatccctccaatgcacaccaatgatggcgagagctgatcgttaacaatgggagtagctactggccggcttgtacacgcagcccatgcgcgttcctcagttggagaagggccggtccttaacgggaagcacccatcacggcgaaatgacgtaccgaatgtaagcgtcatgaatcatgatactaccctatgaattagacccagagcttatgtgggtatccgggaaagaccctccctccactctcaattgaacctttgttcaatgggattctttactgagtagtttggtggagtaggagctgctcgagcggtcgagccctccaatgctgagcagtcgatcgccctgttggaatgggtcccggaatgctaaagctggagaggaatgcgcgcctccagtaaccatgcatggaacaagtgttcatcaaggggaaatcatttccattctggcagaatctagttgtgttccaattggtaagtagcttcaaagaagtttggaacaaaagatatgcgcggcaggtgctaatctgctctcctgaagtttctataattaatcctcttgacgcgtaacagctccctttgaccaatcttcaattgtttgcatacagtctttctcatcttggatctcaacaaaattaaatgtgttccagatcgcaagagatcgccagagatcgccaccgactaatttctcagcaggtaatttggttgtggtacagggatatagtatcgctatccagtttcactcaagaccacgcgatgtcaatgtagctcagaacgcccgaagtgcggtttctttgtccaaatccgtcttacccttgtagctcatctctggaaggcagttattgtgcaacaaacaaacggcgatcatagtttgccaagatctgtagggagattacccgtcgaggctcaaacacctaaatgcaaactggataccactgctgcccaggatcaggaaaaaacacttggctcaaccaagggtcgactttcgaatagtgggtaaggtgggagaaatcgagagggtaaaggggggaagcagccatatgaaagaatgcttgaactactactatgggtgaaagcccagataagatcgttgcatcccttgtgttcctcaaagaagaccctattttgagattggaatgcatgacactaagaatgataagcatctaggaacggattaggttgagagtacaagggacatatcagtaccttgcctcaaagtatacgctcaattgtggtacctgcagatatgcaggtactgaacaaagatctccttcgccgatgctcgccagattaaggcgaatgtccttcattaaacctcctgtgaccagtacttttgctaattaaacatacgtacacatgaagtcttatagaattaatagggatctactcaatcttgattgtgcaacctagattttgacgtgtttcacaaacatcgttccgcatgacgcggttcctcctttacctcaacacttgcttatagttcatactgagtagtaccagatcgggtactccggtccaaaagccctaacccggagcggatcaactcaggcgccgaagtggttgccatgacttcattcgttgggaaacaagcggcagccgaggaacactagaccattcttggacatccgaagccgggccgaaaggagccgaaagaagggggcgaacagccgcaactggtcaggtggtgggtgtgatgacggaaatctgactccaaggcactgtcagcgacggtcgtctttcgttgaccttcctcccacaggcaccctgtgctgttccattatcaccactcctgtcgccgccacacgtttgttgtgtgggttcatgatagtgtacctttgaacttcccttggggcaatctgactatcttccgattgttacccctcgcgcccccgctaaatcttccaccccatcccacgcaaagtggcgtgaatttataagcccagggctcgactcatcatctctggtacatcgacgcgaaaacatctctgattcagtcgaggaagtcgcgctttctcgtccagactcaactatccttgttaaggccacgcaacgcgtcgtgggcgatcacaataccttgaaagatttcgaatacgcacacctacagtctatatgtatatcaacgcagagtccatcaaaatcaaccctattttgaaaaccaggagaggacctcaaccggagtcttgtaccggtcaccttcagcagcaccagaagtgcatgttttttaccttaagaaattcacggatctcgaagtaatcactaagatgtattccaagattgtttttgtcggggttgccctcgtcagcctccactaggtgaataccttgatccacgcttgtgcttcaccatggactcctaccggttcttcggaggccttcgaagccaaaaactctcaaaatcgaaacacaactactgatcctttttcaataaatcaaacggtctattcttcacctgttgtcaaggctttgggtctcaacacacctatattggtacttggcaaaacgtgtctcgaacacagatcacaggttatcaatatgagcaaccaaaccatgaacaaaaagtcctgggagtctctttcttcgacattctccggcctcgaaatctctctctctcaggacagctgttatgcatctgatgaagtttcagtcacatcgactaacccgaccaccgtcaattcgtctgtggtctcgtctgtaacacccactacggcaacggcagagcgtccgttattgaagccgatcctaaaaagaccgtatgctgaaattgcggaagacggagaatctgagtccggctatgcatcgggtgcttctgaacaagagtttgagtttctatcagaagatgattccggctccgactcggattcggattccgatgacgatgaagtgtactacgtcacatgctgggaagatgagtcggactctatgtccgagtatagcgaagatgatgacaatgactatgattatgacgacgactcagccgatggctcctttatttcattcgggtcgaacaacgttaggtttgacaccaacgtgctctatattgaagcgccagaagtccaagaagaagatgcacccagtactgaattgacctgccatgagctgatggagatggcaagggcatctggcagcctccatttacaagagggaaacgatatcggtgacgatttcgatgacgccgagcatggcaatatcagtgactccatcaggcagctgcctgaagaacataccagcgatgttgtggacctagacaagcgacttttcatcgcctatatgaatggcatcaatgggatcgctgatcccggctacaagtcgcgtctgcacgcgctggttggcgacatcatgatgggtcgtgctaaatcaccatacttggaagcagataatgccgatggggtttaccttgatcatgccctcaaccacgtgattggaacatttcccaacctcgttgccaagcaggagtttgatgaacttttgagcctcagcgaagaaaagggagcgctggagcagccggctgaggtccgcgagagtcttaacctgagcttactgaagaaaattgagagccttctctccgaacgattggccagtgatgtcaagatcggacatgatgagctgagctttttcgctggtggggtcgcgtatgcccttgaaaactggaaaccttatatggtccattgaaatgagttacgagcaacaaaaggcttcagtgcagggaaaatgaagccaacgtagtaaaaagtccggcacggaaacacgggaatttatttggtttgtctatagcgatttacaaaagctttatctagcgggttaatctattcagttttgaaatcatgagtttcaacgggcatggtcacgcccatttaacaataagggcatatgtatgtggctctcttttcaaccacgaggaggcaaagaggatagtcttcttacgtatgccgtcgcatttcccttggttgtagcgattgttgccgtaccatcctccctaggattaaacgttgtttctgatccagagagtcgttcgttatgactgccctaaaaggcgacagtaccagactgactacccaggccgactatgaagctaaaaatatgggcatgaccatgacagatgtggaccggcaaacacatgacgaacccactgttcccatactgacatgacctactgccaggcacatcccatacacagatctccccaagctcaagccacaagccacaagatccaaaaataacagacatgcgaaccactactaaaatagacaaaactgtctcgaaccgccccctactatacctacacacaaatctacccaaacacacgtaaacactgaaaccaacgaacgacgccgtcatcatcatgagttgggcccaataacgccatggtatccgatagtgcaaccctacgaagtataatatgcacgcaagattctagatgttcgggaccccaaaaagcaaaaattaataggcaggaagcagggctagggctagactagtctgagacgtaatcaaacagttaagttgccttattgcttttgggggctgggatgattttagtatcatctgagtaaggaagggtggagccgaatcctgcatgcaggtatccgacatcctggtccatcgtgagacgaccactgcggtcgtgggctgattcagatgtgttttacattgggggtgtgctgggtagggaatccttttgcatcaggtatgtaatatgtattggtacgtctagggcgattggtacatacatagtttagtaatatattgctcctactacactgtatattgcgtacggatggactggggtatagatggggtggttctgtctttctcagtggttcctgggaaatttgctctcgagatgatcgactactcgagtcatgtagggacggagtactccgtatctactacataccatcctatcggttttccatcgtggggactaactcacttggtaccctactccgtaccgattcgctgcatcggatataatatactttcttttctcagcttaccatacacacggacacgctatgttggctgagctgatctcagctgagatcactttaatcatcccacgatctaagtacgtagttgattaatccaatctgattgaaaccgtcaccaccaaccatggtttattattacgatgaccccgctggagataaacgaacgacccacgaatggagatacggcattacttagcctacccgccgtcaatagaagttagtacttacgtagcctttgatttagtatttgaaattgcttttcccgaaatgggtccctgtctttttctctttcgaccttgtcaactgccgaatgagatcatcgatatctgggaggggccaactttgatcacttggtgagttcatatcggcagggctatggctggtttctcaggcgtggattggatgggagtgttggtgatgaattaatgtttggctttatcaaggtgcccgtgctatgtctatttcaattcctacaatcttatgcgtcacggacctcacggctttggttgccgtcgagtaagctctgtgccccggtatggggaaatgttgtcctgtgccccgttattgtgctcgggcgtgctgtcaatgatcgtctctttggggtggttgttggtgggtttggggttcaatagttgcggttttctttatttgttccttcttttccaagttttactatactccgtactccgtatgtgatggtgaatggagtatcgagtggcggtttggtggattagaacgggaaaaaaaaaatattagtaaaaggagacagagctggaggaaatgctgatggagggtacatccaatcagagatgtctgctaaagggcatgaataaagaggaacaatagtgtcaggtggatcagcctcttttcctcccccaagtggtatagggacacgattggatcagcttcaatagtctgggaaactaagtttgaatggagagtcggttgtccggtactgcgtgcacgagagccgatccggagtgaaagagggaaggataattcttcgatagggaaaaactgaatttttaggacacgaggcggaccatctcgtgctcggtcgtcaggcaggaatagatatctcacctcagcgtggtgaagagccggacagaaccgaccaaaagcaaatatgatgatcccccagaactttacagatagatttcatacagacttgaaacatggtgaaatccttgccggtccgttttcttcccattttacttttttatttatctttttttccctgctcctttttcttgtggtttcgcccccctgaccctgggagctgggacgggtaaaccccaatcggattggctcttcaagtggcttgggacggaagaccaagtggggtccatttctttcgttagtttttctcgggatggagatcgtttccgtctcagtgtcatcttgaccttcttttggccttcttttcggcttctttctcttcgcagggcttgcctgtcgcagtaacttgtcggtttatcacctcagaatgatgacctgaagaaccatggaacgatcggttgcttatcagaacattatcggaggtttcttccacgggctgaagggggatatcccggctcggaggtgtactccgaccagtggcaagggtcaatagaatcaattggatgatgttggctcatgtcgagagttagatcagtgtttgacactaagagagggaagagagacacgggagtgtcgtaagggctctctttggtttgagcaatgagcagtgactatgtattctgtacagtgtacataagtagactaagaccgacccttgtaacttccaggttagactagcgcggtggactagaaagaaagtgactagtcaggtacttgttggctccacccacggatcccaaagaggatgcgccatcgtgcgtctccacttttccgtctctcctgatcctgcagtctcgctaaactccaattggcagtaaaccttagtatttccgccaaatgaaaagaaaaattaaaaaaaattggagcagagtcgtagtcataataaaaataaattctaattaaaattaaattcatggggactagactaataataaagaattctaatacggtggtgtgctccgtattagactttgtttactaaacttctccgccgttactatgactttagccttggtttagtactcctgatctgctctccggatggaagaagacggcacttgtgttctttctctttctctcgttcttccttcaacgtcagtctcgtctccttctcctccttctactgctttccctggccgtgggatcgcatacaccttgcctgtccgctacggtttacctttctaatgattgatcggttcctcggacccattccaacggtacggagtacactaacgaaatgaatgtgaagagcttttgaacttgttacacgggtatgtcttagctccgttccaacacttttcagcgtctgcactggaatattgccttcttttaccccccgggttcgccttgaggatgagactgagcttcatcatgacgccccatggacggcctgatgtcgtcagctcgcatgctacataccagtagtcgcaaaagtgattttgaggtgggctgtacaattgaccgcaaggctgacgaaattccattgtttcaccggtccaggatgaaccaggtttcccagattcaataacaatagaaaacaaaaagataaaatacgtcaccgccacatcctgaaccccggattagcgcagccccgccagttgtatgtgattcctcaaatcgacgatgcagaatacaaaaggtccagagtccgacatgggccggacggcttcacgctcccggagtaacagcatgtcgagcgattctctctctcgcattcacatgtccccgccagcggcgaagcctccgccttcctttatcgcatcttcgtccgccgctcagatcatcaccactgaccaagaattcaatactgcggacttcgtggccgaggaaggcggggattcggatgctaaagcgattgtcactcctgaagctcttgcagctctgaatggattcttggaccatattctcttcaacatcctggcggctgctaagtcaacgcaactagcatgtattcgaccagcggtggcggatgtgttaaagccgcgactcgcaaaccaagtggtctctgcggcagatgaggagttgagcgagtatatgggtggtccggaggaggaagagtttcaattccgtcggggtatgtctcaaaacggtgatttcgacctgattcgttcctggaaattgactcgcctgcgctgtatggtctatacccgactgggagatatggaagaagatgacgaggaggagtacatcgcacagaatggtttggatgatgatggtagtgtctcgccgcggttttctatgcatgtaggaaatattacgccggcggctgccatcttcctgacttccatcatcgagcatcttggtgaacaggctttggtgatagcgggcgaaacagctcggtcacgactatccgccaaaccgagtgacggtcctgaggaggcagagtctggcggagaacgaagcaccatcaaccgtttaatcgtggaggacttggatatggagaaattagcattgaacccaaccatgggtcgtctttggcgcacgtggcgcaggtacactcggtctcctatgttgtcccgagtggtttctagagaatctattcgacgccgtgcaacagttggtccttcgtcgtgtcggaagagcagtggggttactgatgatgagctgccacaaagaccggtcatcgagatcccaaaggagattgacccggcgtctgttgcactcccggagggtgaccacgatgtcgaggagatcgaaggttttacgtctgatggtgaaggtgctgaaatagttcagaccatgcaggcagtggtggctcacaaagtgcgaccccatagcctcatggtgctgaccttgccatcgccgagatctcccacatcgcccatcaccccactgagcgcaaagttcacccgccatgtccgcgcgaaatcgttgcccgatactacccccccggagtcggcagaaactgatcaaactgccgaccggccatctcccaccgcatctgacgaacaaaagccgctggagaccatgtacgagcacgaagaggatgatgagcctcccaaggccaaagctgagtcaaaggtatcagaggcagatcctctaccggaggaatcgttggagcaggataagatggccacgtcgtcacaatctgccgtgtcggtagaagtcgagtcgagtcaagccagtagtacttcgggttcgtcaacatctctgagcgatcgtttccagaccgattccgacacggaggtgattgaaggacagggaatgtgcgaaaaacccaaattggctccgatacagcgaccgaagcgtgtctgtagcagggacgcaaatcgcgaaaatgacaggtcgactaccgcgactcgagtgatcagcgaacgagcgatgccaacagtggttgatgatccgtcacaaacgcaaggggggaactccaccccggcgcagcctaccatcagtcacgatgtttcaaaggatcctgatacaaataaaccttcaacagagtcctcggcccctcagactcggacttccactgacctggaagagaagatctctcgcccaccttccacttcaggagaaagcgtttattctgatcgttcgcggactcgacataggccgagccccttggtgggtataagtcaccatcgttacggccgctcaagttcaggggtatcctcgataagttcggtaactgaacgtgcagcggttcagcgtgtcatccgaccgtccacttcagcagcctcttccgtctactccagaccgcgtcgctccgacagtttcagtagccaacgtgagaaacgcccagtgaccgccgggtcgaccacgtcccaggtttcaagcaggctgaaaggcctgattggtcttcaggtggattctgtttcaattcgcctgcgcaactcctccgagaccaatcggttcgctgaagaaccgtatgacgacacgaccggcttggacgaattgatccgcagtgaggaaactctccattatacccttaccccgaaaaatatgagggaaattgaggtatggttaattttctctcttcctctctcttttttattcgagttcgtcgactgataatcaattataataggaacctgattccccccgctggagagtcaggtcgagcactgcggacctggctgagttcctgaagaatagcgcccctcccggggaggaagtaccacgtcccagtacctctcacacgtcttccaggggaactattaacacacccaaatacaaagctatcgaaataccctcgactgcgacttcacaacagtcatcagacccggaacaagctgccgatcggaaaccaaatactggctcgtctagtgattacgatcactctatcaagtcgaccggtccaagtagccccctcagcacccagccgacccaatcaccacgttcaccgtcgagcacagttcgcagtggccctaagctggaggcccgttcagcagctagttcaaaagcggatcaagatcggacaaccgagttgatcgacttcattcgtgaaggtccacccactgcaggggcacgccgcattccacgtgcggttgcaccgttccgagacaccatggattcggacgagttgaactcgctggaaactggcctctccgaaaataatgcgccctcggtatctagcacgcaagacggatcaatgttgacttccgtcgggtctcgcacaggactactggagacgggcaaccgaactaccgtacacccaactgctgctcagcacatgccaacagcaccagtggacgaccctcgtcctgtgcgcaaacaacgtagggtgccagacccctatgccattgactcagatgacgatgaggaccttgacgagctcctggacgacccgaagcccaagcgcgaggaggaaagcttgatagatttcttgcgtaatgttcctcctccggagtcggagcccagcccgcagcccatggcagtcaacacaatgccccccaagagctcatccggtgcgttcggaatgaaggcgcgacttcttcgcaatgcatctggggacaaggtgcctactacgaaactatcaaaggcttcgctccgtcaacagcaggacagctatgccgcagcgccatcgaactattcagtcaaagttggcgccgagaggagcagaggcgcaatgtatggaaccagcagccttccctccgtcacagatcggcaaacagagactagtgccctggctgaatttctcaggacgacggggcctcctgagcctcctgcaccccgagcctcctcatcactggcctcgaagggtagagaatccggggtgaatagcctctcgcgccttttcggacgccggaagaagctcgaggtctagtgccattttgtaatcctattttatgcctcgcctattccctactctcatactcttttttcccttattttcattctcaagtctattagcccacgtgtccattagatatgcccttgcgtttctcttttcgttttctttagaagcgatttaaagctatgtcacgatccatcctgtgtttcgtttgattcaggttctctttttccttactacctttgtctacgggtcaagactcctccgtcttgatgtctgggccttgggtgaacgagttcccttccatttatcttccttactttcttcgttgctctggtacgacactcgttggccttttccttctccatataccactttgtcctgttgaatttgtaccccgtcgtgtttgactttatgggatttggaacgaatgatatcctgccttcaatattctaagctcgggacattgttttcttttcttctcttttctttttattgttacaactcattcccctgggaagccgtgtttatgcgtttactctcataagcaaaattgggcggaccgtacatgatatcaagaaactgctagccacgcaatgactaatctctttaatctcattccaacctttccaaggacctgtaacgactgtagaaatattcaaatgatcccaaagtatctttagaaatccggactagtgtagatcaatatctgttcttaaagcgcgcggtcgattgatggcggaacattgttctcccgagggctccggaacccttgagcgcggcgtggcatcaatggcagctcccgagctttgttgtcaatttccaggacctcactgtcgaccacagcgacaatctagcttcgacaatggggacgtcacagcctactttgaggtccatcctcggaatattattcctatgtcttatccagatttccgccgcgttgaaattcgacctgcccgctgtgagcggaaagaacgagcgatgcatccgcaacttcgtctttaaggaccagcttgtcgtcgtgacagctatcgtgagcggtcagaagggtgatggacagaaggttaacattcatgtatgtcgcattacgcccctatgttcggtcaatggttatttgcggtgaattgtgaagcccgcttcacaggactcgtcgggctagattgaatcaggagcagattcgctaatcgttctttccggaaaccagatcaaagatgccctgggcaatgaccacggtcgcccgagggacgttgtaggcgagactcgccagacattcacttcttcggaggataccgctttcgatgtctgcttcgagaacaagcttgagggacggtgtatgtcacctaccctgttcctgcttttaactatcattttctcgcccttatattgtcgaaaatgcttgattgttggactattttctgatgtattctgcagctggtgttgccaacccttatcggtccattgaactcgatgttgacattggcgccgatgctcgtgactggtctagcattcaggaccatgagaagctcaagcccctcgagactgacctccgccgcattgaggagatggtgcaagaaatcgtcagcgaaatggaataccttcgtgcgcgtgagcaaaagctgcgtgacaccaacgagagcaccaacgagcgtgtgaaatggtttgcgtttggcacaatgggaatgctgattggcttgggtgtttggcaggtaatctatctgagggcctacttcaggtatgtatctctggttgcagatggttacgactcgactgacggcttcggctacttgcagatccaagcatcttatctagacggtccctgtttcgaagtgcctggactgagcggaaaggcactctgcattgtagtttccttgttctcatgacaaaatacggagttctatgcatctgtcgagtgtggtttcgacttttatgtagtctcggatatatctacggtatactgtttgaatactcttatgatcctacgatagcgttagacaactagggatgatgtaatggattactccgacttcaaagaccaattcatcaggacatattgtacatatgtaccatgtgcatagccgcctccctgcgattaaagataatctttgtaatacacaaccccggttggctgtgtttagagcatgcaaacacaacaaacaatacctccaaaatctccggatgttgtcaatcccgtcatggtgaacgaagaaacaattccgattctccccagcgacaattcccttctgcacaactctcttgcgacaaacacaccagcagagccaacatgtccgccccaagactcatccagcgcttcgcgcgaccctcattgtcgccattctttctcagaacaaccctcgcccgtcgctccttcggtagctcggcaattcgtcccaaagacgataacggccgcgctccctcaacagcgccagagcaccgtgaataccagaccaaccggcctcccaaccagcatgtacccaacacgacttctaccatgaccagggactttcccaaggccggggaaaagtccgtgccaccggaatttgtcagcgctgccgacccgaactacaagccggcggatccctaccccggaaaggttgagcatttcaccggtggtcgccaggagactggcgcgcagaagccggagcttggtgtgggtgagatggagggtattacgttcaaggttgagccactgaagcgcactggggaggatgtttctactatcagggccaggttgctgtgtgagtattcccccaatctggtattactaattcattgctgggaggtccatggggactgatttgggtgcctgaaatagatcagagccggaagcgaggaatcctcgagtccgatttgttgctttctacctttgccgacgtttatctttccaagatgaacaaggagcagctgcaggagtatgaccggttcctcgacgagaacgactgggatatctactactgggcgacgcaggatccccctacggaagacaatgttgctgaggatacccccaccgagacttggaagcgcactggggctaagagcggcgaatgggcccagacggtcggtgcctacaaggctgcttaccggcccgttccgtctcgctgggctgattcggaggtcttgcgccttttgagacagcatgtgcaggataacagtgctactgggttccatgctgctaagagtaagaagactggtggtgcgggacttggtcgcatgccgaatgttcaggtgtttgattcatgagttagatttgtgtattgtatagaaggatgtttgtacaaaagcatactgggttgggcttgtattatatagttggtttgtgtaggaagtttatgcattctttgtgttggttccttttcttgtcttgtctcagagttttggggatgtgctattggccgggtggattatgtatctagtgcatgtactgtgcaggtcgactgttaagcataatagatacttatagatacatgacagctagtaactatatagtatgcgactggtatgtctgtccagtctctgatgtacagttagtcacatcctcttgttgagttacactttctatttagggtagatgtctcacgccctcattgataagagtattactactggtcaataatgagaaatccacaggaatagtgtactgttataaatgttcatgaaagcattgaaaaatgaagagagatgtatacagtgtaaccaattaggcaatacaaaagcttccatctcttaaagatcccgacagcgaatggcattatattgttggatgatccactattatcggaaccaggaactagtaagagaactaagagaactaaccgctgcacgtgactcgcttatgttagggttccatgtgaccacgcacacagagggcggtaagggagttagggcttaggcgggcacgccgactctgctcctccatcttcgaacgctgggattttacctcagagtcaacgacaattgctccgcccgcgttcatcctctctccctctcgcggtcccctaccatcgtcatcatggctgagcagctggtccttcgcggtaccctcgagggtcacaatggctgggttacttccctggctacctctttggagaagtaagggaattccggatccgatatcaaagacaagaaagaaatttttgaagccataaaagaaagatgtgaaagtcttcagtgatgaagaaattcgagaaatggcattggttgattaattctggataaaatggtttctgacttgattctttttccgactctagccccaacatgctgctctctggcagtcgcgacaagaccctgatcatctggaaccttacccgcgacgagcaggcctacggttaccccaagcgcagcctcgagggtcactctcacatcgtctctgactgtgtatgcataccgaacccttccgaagaccgtggatatcgcgggggacttggtgcgaaaggaagttcggctgacatgtggattttgcgaattcaataggtgatctcctccgacggtgcctacgctctgtctgcctcctgggacaagtctctccgcctctgggagctcgctaccggcgagaccacccgtaccttcgttggccacaccaacgacgtcctctccgtctccttctccgccgacaaccgccagattgtctccgcttctcgtgaccgcagcatcaagctctggaacaccctcggtgactgcaagttcaccatcaccgacaagggccacaccgactgggtctcctgcgtccgcttcagccccaacccccagaaccctgtcatcgtctccgctggttgggacaagctcgtcaaggtacgcatcagacagtttccctttaccctttaccgaaatcgatgtgttcaaatgatgtttctgtataaaacgtatttgctacttcagagccatatggccatgagaccaacaatcacctataccctgatgaacaaccaacacatcaatgctatatctctgcatctgcacgtgaaaaagtgtgttcacagctaatctgaactgtgttactaggtttgggagctcgcctcctgccgcctccagaccgaccacatcggtcacaccggctacatcaacaccgtcaccatctcccccgatggatccctctgcgcctccggtggcaaggacggtaccaccatgctctgggatctcaacgagtccaagcacctctactctctccacgctggcgatgagatccacgctctcgtcttctcccccaaccgctactggctctgcgctgccaccgccagcagcatcaccatcttcgacctcgagaagaagagcaaggttgatgagctcaagcccgagtacatcgagaagggcaagaagagccgcgagcccgagtgtgtcagcttggcctggagcgctgacggccagactctcttcgctggttacactgacaacaagatccgtgcctggggtgtcatgtcgagggcataaatgatgaatacccatcggtgagggacatgagaggaagataactattttgttttttatttttccttaacaaaaaagggcaggcattggttgggatgtatgagccacgagcaatgaagcacttcggcgttccttaaccggacccgaggtttttctaaacatgtctagcttactcgattcataaaatccgactgtctgggatcttgtaaaggaagacatgccatgttctaatacaaagacaaaaaataccttaaaaagcactgctggggctgagacattagggtaaggtgaccgtactcttatctatatcactgccgtatctgtacacgtagaaactgcccgtcatgtcctgccgggcttttcatatccatctatccatacactggctatatcatattgtacatgtcacagtctaatagtacagaggcctgcactcatttagttcttcgtgagcctcttcagagcggcatcggccatagagacgccctgttcaaagcctagaccctgcgacaacgacttggcttctccgtagagcctctccgcctctttcgccttaccctggaactccgccagccaacccaggttgaacgtcgccgccacgcaagaagtatcacactcctcatcgcgaacaggaggctgaatcctcgctgcaacatcaagcgccttctgcgcccacttttcggcagcatcaaaaagctgctccttcgccttcttcgggtcctcagcccgaataggcttctgcgcctgtcccgccatgcagccagcaacactattcagcagcacaacctgcttacacgtcggcgcatccccctcctcagtatgaagcagattcagggcgcgcatctggagcggaatcgaaagctcatagttctcctgcgccgtatacctccccgccagatccgtcaacgctgtcgcaatctccgtaacattcaaccacccctcggtattatcagcctccaacccacccccaacaggaagccccagactctgccgccgatgcaactccttcaaacaaagctccacagccgcaacctgcgccgcctccgccttcttctcatcctggatataatcactcgaatacaactccgcaagcttcatctcaatccccaccgccttcttcaacaccttatcccgctgctgcttctcgaattcttccacctccttcctcttctcttccccttcctccttctcaatcttcaccccaatcaccccctccccacgatccttcccctccacaaaccccataatctcccccttcgtccgctccaacacctccaccgccgccttcgccaaccccgcccgctcaagcatcatcgcaacctgtatcttaatcccaaccacctcatccgaaaacggatgcatccccatctcaatcccaatccgcaacgcctccttatacgcctgcagcgccttcggcggactcagatccacctccgtataatacaccgccgtccggagcgcctccgccaccggcggcgggaacttatgatactggggcccgacgcgcgtgtactcgacgtaggcaatgtaggtgaatatggctgtggctgttgcggcggagaagagcgcaagagggagcaggatggggtttttgcgccagatgtcgcgtttcgcttgtttgagaccgagggtccatttttggaaggtcgagagggagcgtctctgtgggaattggaggggttggaggtggtgtttgagacttgggcggggggttttggggagggtgctgaggcggcgggtgagtgttgaagggagggttcgggggagacggagggttgttggtgtgaacattttgttgggttgggattgggtttctttggtggtttttttgtgtggtttatttcggcattgaggttttcgtagtgagttgtctgattgagtgttgattggtgtgagggagtgtagtatgtgaaagagtatagagttgagttgagtaaaaagagtgtaggagaaagaattcaatcgcggaaataaattgaaatcttatcttacgttcctattggtcggagctcccgtcgcagtatgacgtcgcacttttatcgatttccctttactattccaggcacccttctctatctctgcctagattgggcttgtagctagcgaccattagttgattttgagttaaatacttcccttatttattctcgttacttgatggtctgaaaatgtgtggtagatatgctctcggcgtggtatgtcatgtccctctactcactcgacttctataggcagacaacaaggtatctaacaaacagaacagcgcatggccttcatgcgtcgtcgcctccaagaacaaggcctccaggtcgacgaagcgccctccgatgacgaggtccgagaaacctacaacttcgctccggggaactttggtgctgtctatcgtgcggatatatatccttctgaacacggcgagggacaatatgagaacgacgacagcggacctcacaatacatcacgtacccagaatagagatggagggaaagacgaacaaacgcaatcaagctcccagctccactacaaaatccaaagtatgaagtggggactggttccgtcttggacgaagcggaaaccagattacgggtcgctgatgcggacgatcaattgtcgggatgactcgttggtcgaggatcgcgggatgtggacgtctatgaagcggaagaagaggtgtgtgattgtctgccagggtttctatgagtggttgaagaaggggcctggggggaaggagaaagtgccgcattttgtgaagcggaaggatggggagttgatgctttttgctgggttgtgggattgtgtttcttatgaaggtgagtttgtggacatatattgggttgattatttggtggttaggctgacatgctgtggaaggggaggatgagaagctctacacgtatacgattattacgacgtcctcgaactcttatctgaagttcctccatgatcgcatgccggtgattcttgatccgaatagtgaggcgatgaagatatggctggatccgactcggacgacgtggtcgaaggaactgcagtctgtgctaaagccgtacaagggcgagttggaatgctatcccgttcccaaggaggttggcaaggtcggaaacaactcccccgacttcattgtaccggtaagtagtaaagaaaacaagagtaatattgcgaacttctttgcaaatgcaaagaaaaagaccgagccgggtgtcaaagtcgaaggcgatggcattacggatcaaaatatagtcaagaacgaagatgatccgagtccaacgaaggatagtgaatggagtgaagacaatgcacccaagccagcagcgggcatcaagagggaacgcacccccgagggacctggagaggtagcagatgaggaggtgaagaagccaaaaacagagctgcgcaccccttcgccaaagaaggtcacagagcataccccagtatcgaagcgacagacaagccccgccggaaagaagatgcgaagtgcgactcataatgaaaagccgattaaaaaggtaaatgtgaagaaagccgatggatctcacccaatcacaaaatttttctcaacctgaagttgttctgcctctatcaaaatagcatggtgtgagctattcggactgtgccctgcaatgctaaccgtcatgatgcgatatgagatgcgatatgaaccaactggcctgcagtttagccataattatcatcaagcccattaaaatacactcgaataatgtacatgaattctcaattcgtccgctattgactctcctgctggcgcagcctctgtaccaacttttctctaaggaatgggctcaaacccaaactagatctgctgttagtactgttcagtgtcatttgaagaagttgtgacctacattccgtcccgagtcacgatccgataagtacctattgaagtcagctatgcccactggaacgttctgtacagaaacaccataccacttggctgataatttccgttgcttcccacgaaactaccgtcactgtcgacctcaagacttccaaaaatatcttcaggccatgcgatccggccatactcaggtggccgcctattgtctgaaaggtgtatccagcctcctcgcccggcggatccagcaccaccttggccgctcgctccaccgctggaatctgctgcactgtgccgtcttctggcacgcccacccgtcaacaggacgccaccagagcccaggttagcgccagatgtagacaccatcacctgggcttgggagacagcgtccgggtcctggtggccatactcagagaccacatcctgtaggatcttcaggaattccgggttctccttaaaggagtccgtcgtagggggcagtttagaagtgacaccaatggacaatctagagtttggaggttctgacggcaacaatgacaagacgtggcttccattagatgggaaaacgtactagataaattgtgagtgccaatcatagcaaagattaactcgattggaaacatacaatgtgaggatgattttctaacgtcgagacaccccggatctgtgaccatcttgacagactaggagtattacggacaaaagtcctaatggcaaacatattgaaatgacttcaattgagtatgttgttgaacaagttggaggtaaggattaatcttcgatagttaatcggtttagctatgacgacggaggcaaacacaacaaactcatgtgactccgcgttctggacccaagtcactccgcatcaaatagttccctcaccggaaatccatagggtcgggtggtgttttggttgataaacagtctttcgcttttctttggccttctcaattcccattctctgccttcaaactttggcgatgcttttaatagtctagtgagttttcacaattgcatggtgttgcccggtcagcccgtcagatagaagataatgaactgcgcagcggtgcagtattgagaagaggcccaaatcgaactactgctatcgttttatgcgtgatacccagcatttgtctagttattgatctggttacattttgaattcatcgtattgagcagctacaatggcgactccgtcttccaaaccaaatcccggcgcaacgccaacccatctgacttcttctccccgcccctctgggcctatggctcgacctatatcgcacaaatcaccatcaacgaggaccccatcagcttcgggacatgctcataaccaccaaccaattttgacgcatcagaacgccacacctctggctgcagccaccggggctgacgatcccgtcactctcagctccccatcggctcttcttgcactcggtggctatggtgggattagcccgtctcccgcagtccatgacgttttagtagcacccggtatgcacgacagcgacattcaggcactcggtatgcaaggcctgaaactggggaatgcgcgcgacagcgacgatgagcggaggagacacattgaggacgtggttcagcttctacggacgcgagtcgcgggaagaggtgtgtgcagggaaggcattgagcgactgggccagcttgaaggctttgagtcgatctggcaggaggatagcctcagtattgcggggaactttgtcgacctcgaaattgagttctaccgtgcgcagaacaccgtgaaggatgtcagcctgaatatcgcaacgccagaagccactgacggcgaacgtcgggaagctacggctgtcctaaagcgtgatttgatagaatcgcctgaagacggaggacggagctcttggaaaactttgactaagtttcatgagaatctacagtggcttgctaagcatgacagactcagccaagaagtcaactgttttgaggccatagaaggcctctacgaaagcctgaagcgtatctgggatgaagaagggcatcaccgcaagttttctggtattcacgatcacctctgcagtggctgggttggccagccgtgtctgcatcaaggaggccgggttggcctcaacttagagtactgggtacatcaagcacgcgtcctggactccaagcaaaagaaggtttctccggatgacatggctatagatcagccgtccgtatcgtcgatgggtggcgaatcagggaatcataacggcaaatggaacatcataatagagtgtgaagaaggatacccgtcgctccgtgtgtccaaagagtgggtgaactccgaagtctttacagtcgtgaacaacaatgcgaacgaaccgtcgtcgaacgagatgggagggtctgatgttgctgttgttaactgggcagacccgccggcgactctttcttcccaaggccaacaagatgcaatggcgctcgattcaggcatgctaggaaccgcaccgaatcggcggtttgttgcgagaatggaaccgccccttgaactgccaatcttggcagcttcggacatatacagacatctgggcattcagatgccacaagagtttaagatggtaacttacgatggactcttagcaccgggatggtcgccattatcagcggcgggagctatgggtcttgggcctgaagaagcatcccagctgggtcgcagaaggcgcaggatggccgtccagagcgttgatcaggatggcaagccatgtactaaacaacatagctacactttccaacccttcgaatctgttgctgggcgtacgatgcgtgatatcccatttgcgcacccgcggcagcttgcagatattcttccggtgagatcaatagccaaactactcatgagagaagttactgattccttgttttttatctctctttacagacactgcgccaatatgcgtttttagcaaacatgattcgtaacattttcagtcccccgtccaagagcgacgacaacagaaaggatgcccaaacagactccccaaagagccccgctagtcagctgaaattcacggaaccagggaagccaaggaaaaatgtgattaccttgagcaataaggatcccaacgagaaaaaactcgattggttgctgaagggactccacagcacggacaggatgaaggagaaagggaaggacacggccaactcgaacgctgaaggtgttgacgacgatgtcgatgaggttaaagtagacgttacattgcggacacagcttggtcaagcgcccgtcgtcatgttacttttcacggtaaacgatccacccggttctgcagagtcggccaaggaagaaactactataagcaaagtttccgtgagtttggaagttggattgaacggccgcgtctcggtggtagatatgacaggattgttagatcactgtagcagtcttggagacatggacgtgcaaatgaccgacggccagaagaacgaagtgattgaactacaaaacaagatagctcgggtgctggaaatatctcaagacatcgggacgttggtggaatggatcctacgatggatgcagcagcgaaagggccgttgagaatacctgtcacacatcccggattggctgggtagccgcgggtgccgctgccgccgagtggagagggttgtctcgaccacgctgtcggctggtagccgctgaagtgattccctgcctccagcggatcagttgaggcttgaccagatcttcatctgaggctctgcagacgagacccatctccctgtccggagctagcccagcaatcgatgctgtacctgcatggactccatcccctatctatccgccaacagagctctgccttgggagctctctggggactacggttactatgccgacgcagtttctcttacaagatagaatcatccgttgctagtcttacctgtccacgcgcagttggcgaagaaataatcgaacgtggaacatgacaacccaaagggcagcaatcggtgagaaaaggaagaaaaaggaaataagatccgatgggatggagatctgtagctttacacgtttccatacatacatatgcccagacctgcgagatgcagaatgaatgttgttgctcccaagaattaaagttccggcccatatggaaatggcggtggaggcggctagtgtaatgcctggctgccttataccagggctgagggatttaattgtacatctcagtgcatgaacaaccactgcaaggagaccgtttggtggttttccattatctaaaccatgagggaataacaagtatgagaatgacctgtcaaatgtcttcttggcttcgtggtatcccaaaaatattcccatcgatgtcctactaaagaagaggaagcgacaaaagaagaaaatcccaaaaaaaatgaaaaaagaaaagaaaagaaaagaaaatccaaggctggaagaagaaatttccatgatcaactgcgcgaattaccctgctagatcggatacctcattaaaattgtgatccatcgagggtttcaaaaaaatatgcattgggattcttctgcatgcgttgacggggcatgaggcattaaaattccattggaattcttaattacaagacttacagaacaagctcaatggaaagaaatttgtagtggaatgattttcattattcctatccctttctgcgttctttcttttctgcccctacaacggaggacatgtggtcatgaatcgactgtcgaatttccccgccaagcgatccagtgtgactcgcagatttcttggcagatcgactggtgaagatgaattcatacgataggaggactttctccaagctattgttccatgtatgttcaactgtcgtcaacctgaggcattccaggccagcgatgacgattcgggccgaatccagtcagcagcgtttgtcatggacggcgggccaggaccaatcaggacgcaacgataagggacccagtcagaatgcggagcatcacagggaaaaacatggttggcgagggaagccattactcactatcaggctggtcaatcacaactattactcgatccccctcaatgtcattattgattttccggtcattggatgacagccatccctttcgtcatgattaagttgcttagatcgtgatgtcggtgagggatattcaaaaatggcggcacttcgggctgtattatccgaggtcgaaagggattttccaccatcaatttcgggatcacaggagcgagaactttcagatgtcagtcatgacgcataaatcagcgtaaaactggaagttcttgcgggagggcgctaaaccgctcctggattagagactgcgccacaggttctattcttatgactggctgacggcctacggcgggctgaagccgcctgctgcgcattcgaccatatcggggttgatgagagtggatatccttcagaatagaatctctagacctcaatacaatacaacattacattttgatagaccgtatctattcttttctggtctcgtttcaccacgaactaataataaccctcccggtctcacaatctcatcctattaggggaagactagtactaagaatacattgctctctcctgcagtggatgtcaaccacagggctgatccgaaacctcagcaagacggacgttctttgtccccctcatgattctaaaatctctcagccactcatgatgcagttgattcctgaatctcccgaccacggacgcctgtcatttgctgtagtacaatatctcacggaagaatgatacaattccaagaagatcgccactccggggggactgttctggagaatccttgtacacccccaaccggttgtgaggttgaagtgacttaatggtgaccaccagtcccttctgcctcgaccctcttccacgcccttcgaggcggtgcggaccgcagttttccccccaagcggaccaatccgtcgcctaaattccctctaagaataaccctgactaaccatctgggccggtctcggggacttggggcggcttaacttttctctctcttgctcgcctttttcgagaatttcttgccacgccccacatctgtggaggtttattttctgtaaatttgcccattttcactgtcagtactgagaattaccggctgggtgtaatcttgccgttttgggtgattatcgaggatttctttttttaatcctttgatagacttggaactgatagttgttagtccagtagataaggatgtaattcaaaggaaggatctttgtttctgctcaaccagataggaggaataaaaggcagaagctattaattccaaagcgatcaatcggcagacgcgctatgatccacccacgcgactatggcggggtgtctttctgaggggcattgataaggaatccttctgataagtcgcaggtaccatggatgttgatatgcatcaactggagtatggacaggtacatgtacattcctatcggaaagaccctaccaatacccttccaaaacgtctgttcatctgatcccggaacttttgtcggtcagtatgacaaggcacatatcgagacaaaaaaagagagagtcatttaaaaaacatgggacgaatgatatccattccgtgaatcagtttcccatatgacttgctataagccatgcgcccggtctaccaatggggcggcagtccaggacttttagttgcatgtaacgttcaaactaaatggatagatactcgggtcctgcagctgatatgcaccgtcgtcgattaatggttgataatacctcttagcaacagcttttcgcgtcgctatctaaaagcctcagtcaggcaaccctcatcgcggtgggagtgtatccaaggcctggtcagccgacttataatgatcgaaaggggaagtcacaatgcatggaacatgtcgaggaagtgtaattaaacatcgatagaaggcgtccggatcaccgtggcgtggggtgcgattatctggggaagagagatacgggctagatatccaagcgccgtcgagggagattccggtgattagtattcacagccattctatcgcatcggactggcccgttcaaaatgactctgcctatttgcttttggttgcagttacctgcattacttgcatccatgtaatttttttttccaatttactctagtaactgtatcggcgtaaaagaggaaagggggaggcatttttgattttgttggatccatgagggctccatctctttacccaattaggtagtgttattgagtgcctgaggtgcggtcttgggcaggaacctcgtaatccaccgtgtattaggaagatagaaccatctagccgacgcctatcttatgttggttgggaggctatccgactgaccccatgtagctcttagtacctggtcacatattctcagataggagagtacctgatccattcaatggtggtgtgggaactgaatggcggagagcaacccttgtcttagctgcagccttgctgcatcttctcagtgtccagacacttaccacatattgtgggtttgcgcctttttttttttttttttttttttttcccttgtggttttgaattttctgaaacaccgcaacaacgcatccactttcaacaattaattcaaaaatgataattccatgccaaccatcagaccagaatgagtctacgaaactacacgtacacatttctaaaaatttactagattcttgagctattgatagttattttctaataataataatactgaatcaccaaaaaaaagcctacctgaattcagagtgaaaccagtctggcagttatgcagccgaaaaaaaaaattaaaaaaagaaataaaaatgtaaaaataaaaatatcccaaaaaaaatccgtgggaaattcaatttaccggtgcggtgcccagcaaccgagaatatcgaccggtgccattaccgtaattttcaagccgaaacgaccccatacccaattgggatgaatttgccccctcccccaaaaaaagctacaatggattgaaagtctctctttctcttaaatttaaagcatcgcctccccacccactgaacctttgtcacttacatctctatccttctatccgtaaccttacccatctcccttcccttcaactcgctttgctttaaatctcctccttttcacttcctttcgctaccttccaatcgatctcagatcgtcgttccgttttcgtctttatcctatcgcaggaacaaagcttctttccaagcagttaaaattactgggttctgctctgcatctgttgcaagctgagatatcttgaaaaaccacttctttagtctatatccttcacacacacatcaattcatcatggtatgtgatactcaacctcttatctcgcgcgttatcgcgttgtggttctcattatcagtcggataagtgctgactcgtgactcatcgctacagtctgaatcaacaaccatctccaacacggagaatgtgcgttacacttctcattgattgctatcatgctttcttcagccgtcttcccggctttgaggaaacaaacatactgacttgcgctggcaacagctcatgaagtacatgaacctcgaccagcgcggacgcgtgcaggccgagtatgtctggattgactccgttggtggatgccgcagcaagaccaaggtatgtattcacccacgacctctatcctacaatcttatccgctggattgcgtgtcaggttggaagtatagatggggggcattgaatggcacggcgcacagacgcaaagggatcgtgattgttatctcgactccttggctgataagccctgcgcacggtgatctgatgcaccctgttcctgcgcctacccgtaccacgtgaccagtcatgggactttgattgctgaccccactatctagactctctctaagaaggttacgtccgttgacgaactccccgaatggaacttcgacggttcctcaaccggccaggcccctggtgacaactccgatgtctacctgcgtcccgttgctatctaccccgaccctttccgtcttggtgacaacatcctcgtcctttgcgaaacctgggattcggatggaacccctaacaagtacaaccaccgccacgatgccaaccgcctgatggaggtcaacgccaaggaggagttctggttcggtcttgagcaggagtacaccctcctcggcaacgatggctggccttacggatggcccaagggcggtttccccggtgcccagggtccttactactgcggtgttggaactggcaaggtttactgccgtgacatcgtcgaggctcactaccgtgcttgcttgtacgccggcatcaacatctctggtatcaacgccgaggtcatgccctcccagtgggagtaccaggttggcccctgccccggtatcgagagtaagttgcatcgtccttatttactgtagggtgttcgaggtctaactgttttttttttcttctagtgggcgaccagctttggatgtcccgtttcctcctccaccgtgtcgctgaagagttcggcgttcgtatctccttcgaccccaagcccatcaagggtgaatggaacggagctggtctccacagcaacgtctccaccgtcgccactcgtgctgagggtggtatgaaggccattgaggcttacatgaagaagttcgaggcccgtcacgttgagcacattgctgtctacggtgagggtaacgaggagcgtctcactggccgccacgagaccggcagcattgataagttcagctacggtgttgccgaccgtggtggtagcattcgtattcctcgccaggtggctaaggatggcaagggttacttcgaggaccgccgccccgccagcaatgcttgcccttaccaaatcactggtatcatcgttgagactgtaagttctatcttgaaaacgttgaattgctttaggcatggagctaacggatgcgttcagatttgcggtagcaactagataccttaaccacccaataaaaacgtgaagacttttgtttcctcttagcgctcgtataccctccggcgtcagttgggatcgaactaggagagcagcctggcagtgtggagcacatagattttctttttctttttctcttctcacggtggtatttcaggttttctttaactcagatgccagagcttgcctttgcgttcattaccccatgccgtttatattttaattacttctctttcgttacttgttatgtgggttatgtgttacgtcaacaacaacatagaaggatcacagtgaattggacaatcactaggaatggaacaactgtttaggaaacaggaaggaaagaagcaaacactgtcttagtactaccgtgtatcaaatacaactaatcattctctggtttcacctgaagtaacgatgcgccaagtctgatgtcaactcgtataatcaacctacgattgtggcaggtgatttgtgtctatatcttgatcggtaactggtctatcgaagtcttgtgttcgatgaatgcaactatagtaacaagtactaactctaaacataatttgcatcgaaggatatcacatgacccaccataccatgctatgtagctctccaataaatagtagattcccttagacataaggcatgtggattattattatcaccaagttcatcgtaaggacacggaatatatgctcacaaagctgactttcgtcataataagcttgtattttgtattgtcagtagagtatattctagaatatctgttaattagaattaacatcctcatgataacgagatgtagatctgtagatctgtagatctgtatgtatagatacatgtattaatttttgtcaatggaccacaccaaagtcaacccagtctgaccagtgaataaggtcagtaaacgctgacaaggagatgcaacgtacatactatatagtattggtgtacgtacgcaacaattgaccgattagtttagttaccccccctctttttaaacagaaaaaatacactggaacccaacccatcgagacccctctgctgtgcctcgcgtcttgcagctccatccacgatcttgtccgggtcattctcatcactcttgcgtccgtcaatcacccggacgagaatctgcatcaacaccgccgcgaggatgcttccgcacaggatgcccaccatgactaggttgcttttccggaacttgagacggccgggcgcggcgctgtcctcggcccagccgttgtatagggcgtatgtcgttacgatactgccgagattgcctaggccggagacgacggcggaggcggctgcgacgccgacttcgccgtggcggggttggaagatctccgtggtccaggtcatggttatggggactgtggggccgaggccaaagccgacgattaggaggccgccgtagcggggccaggagttggtgtctgtgccggcgtaggtggtgaggaggaggccgaggatttggaggaggacggggacggagaagaagacggcgcggtggtggtggaaacggtctgagaagggggttacgaggaggatggcggccaggtccatctattggtttttttgttggttagttctatggtgatgttgttatggttgggtttgtggtgctggttggagggtacttacgagccagattggcgcggagaggagactgaggtctattccgctgaggttggggttgatggctttgatgatcactgtggcgtagctttggacgccgatgccgacgcctactacaccgaagtacatgatgaggaggggccacaggcgccagtcgaggaacacgcggaggaggtcttggagcgtccatgccgagcggtggtacacgcgcttcaggtcatgatagtggatttcagcgtcccggccggtcagcgcaggggggctgcgcgggaaccatcgtaggtatttcttcttcgcgggttgttcgcctggaattgtcggccggtctggaagccaccagaggaggaggatgccgacggcgattgttatgacaccccaaaccaggaacatccactgaaatccgacgtagcctcggacgccgtccatcttttggaatccggccgagaccagcccgacagctgcggcggaaagctgtgctgctgtgtagtactggccaatccgcttccccgttcgagacggagggtaaaaaagggtgaggtagtaggccatgccgggccacatgcccgcgatgacgataccaaggagtagacggagaaggctgtgttaggttagttgctgcatcatggaaggtcttagatgtttggaacatcagaggtagagctccaagaagcgtcggggacatactagaaactccaggcggctttcatggcggtcatgcaggtgccaatgatgccgacactaatgacaatgcgactcatccagacatgtggactgagtctggacatgattaagttcgatggcaagtcgaaaacgacatagcatacgtagaataaggcgagagcggtcgagacttggtggtcgtttacgtgcagaacgtcgaaaatcgtgtgattggtgtctatgttcatcgtttgggccagtgagacattggatcggacggcagcgcagaggaaataaagaacccagaaggccgggatgatgcgaaaatccagcttcctaggaatctgtcagatatgtcgtttttctttccttctccccaatgagatgtgagagagcatacctgtagatgcgctcgatgtcggcaatatctggttcgctgcccgattccacatcgtcgcggccgtcacgaaactgctcgcggatatctctactatcaggattcttaactatgtcctcggatggaggttgcggttgaactaaagacatggtagtgtcacggctaagtataaggctgacctattataccgcgatctgatgaaatcctgcagcaccaccgacgccacaaacaaaattctctctcgggtgaggatagaatgggacgccttaaagaacagttggagacgaacagaagtctaaataacagcaacgagagtaggattaaaactccgcagatggtgtcgagcaacaaccccgcacgccgacaagaaactttttgatcgactagaccggaaagttctccgagtacttttctcaattagttcgcaaatcagccctaaaaatgaaattagaacggaaacttttttcttctttttctctttcttttcctttgcagtattgcggcaaaatcaatatgcaacacacggataaacccgtggactttcgcatatcctcggctgtcgtggaccgtggtgtagctcccatgggtcataacgcctcccgagtcaactcaatcgtggatgaaaaagagacatacctgaagaaaaagagccattgccggtattatctccaattggtttggttggtagagtgattgactgcttaatttaaaaagaggggttcgacgctgaaagtgattgataaaattattatcgatagctcgatagcttggatatccaactctaatttaatccgaggtgccgattgtggggcaacgatggaacctccgtctcgtgtttttatcgtttagtcacaggtggcctagggatgttcagcagtagtgacaatatatcaagagttgaaattcaacaggaattgaaaaagagccggttgagcgaagcagtcgcaaagtagggataaaggttcaaggttctcgactcaatccatccgatagtcggcgggaaagaaggggaaaaaaggcagatccaccaatgagaagctcggaacgcagaagcataaccaaccttgcaaatccaaatgttaatcgaatagaagattgtcattgacagagtttgtggaaaggcacgaatataagaagcccaaaaaaacccaaatgactcattcggataacttcaagccgatgtcgggtccttcatttacccaactttggcttcagtgagtgccaagtgacgacagtgacaagacggggatatcggtgagccaaccggtgaaaataaaaaacttttttgttggctcaagaaccgttgtttgtctgggagtacagcaaagaatctccgaaatcagttgtctattggggatataatcgttccgcatatatgaagctctgcacctagcagaagtgctgtacttcccatctacttcttttgaaaaccgaatcaccactgtataaagcttgctcgcctggtatagttcgccttcatggcgaccgttgtagtctggtagcaccactgttgcttgtagcttgtgaggtcctgctgaaggtcgagtcacctagtagccagggtgagtcaagtctggtctatgacttctgaatagcaagatcgtccatggatcaattaagcacaggtgcatccgtgtattcctcgttaaaagattctcgtccatggccgtgcatctgaggaaggccatgatatcaatgaaaactgttatcaatgctgtacttactaatttttaaaacagtaaatgttctcaattactgaagtcaccgactgtcgtttatccttcaatggccttttaatgccaagatgacaaaagccaccttcaacttcggcactatcattatcgatgtatcctttgcatcaatctcgtcagacatctagctagtatgatgctgttgctgtgcgaaaagggcgttccgatgacactctttttgcttagcgcaactgcgcgagcgtatgagatccctcttgagtcgagcacaataggaaaactatacgaaacgaacaggtgcgtttaggaaaaggaggagtgtgttagggtttaaggtttggatagagagatgcgcataagctcagtatattccagagtggtttaatatttgagagaaacatacagcatgcaatgaagatcgtagcaatattgcctgggtgtgatatctcatacacttaaaattggcatgatattggaaaatggaaaccaaatcaggctggtattgtacctgcacgcatatacataacgctgagaaggtttggaatatctactgaaagatataaagaaagaagactatttgctctgctggagaagctgatgctgtgttagctacgacatgtgacccaagtcaaacagtgaatggtttctgttgtttgttgtcgacttctgtttgtatctttccaccaaccctcttctccctcttctccctcttcccccccttcatcctgtgacctctttcaaccctctgtgctcgatatcttcttttttacttgagtttgcgaagtcttctaatactgctactcctacaaagagcaactttcaggtgagtatcctcctgagtctcacactgtctcccatgctagtagtcgaccaagcaacagacacttcgctgttggtgatataacctctccgtctacacacgttgttcacgtattttatgctttcactccctgaaaacccaactcatatcctaatcttatagttttaggctcttcacagtgacaaacgtccacatacggacaagatgggtggctggggtgctgacgatggagcggctggatgggagaatgctggtgatattggtaagtgttcatgatcacgagtgtaatcataaccatgcatcatggctttgccaattttcctgttttgcttcgacgctgacatatagatagcgacctacaatgacgaaaatgctaacccatccggcaacttcaaagatgatggctttggtggcaatgcctgggagaatacgtctgccgggaatgaacagaacgatgacaacaaatgtcgcaagtaggttagcttctatgactctcttttacaaatactaatgcatgtgcagctgtggaagcgatggtcatttcgcacgtaactgccctgagccccgcaagggtatggcctgcttcaactgcggtgaggaagggtaagcaatttgacaacgggatgattctctgttgctgagataggctgtagtcatagcaaagcagaatgcaccaagcctcgtgtttttaaaggcacttgtcgcgtctgcaaccaggaaggtcatcctgcttctcagtgccctgagagacctcccgatgtgtgtaagaactgcaaaatggaaggtaagaccattatgactgttatctgcacgagatagactaacttatggttacaaaggtcatagaaccattgactgcaaggagaaccgcaagttcgacctgaacaacgtaccggacaagcttccagaggaggcctgggcagccatgcagaaggccagtgaggagaaggatcttgaggattttcgcgaagtatgtttctcttcgacattcctaattcgtttcatttgttacaggaactcacagaaaaaaaggctttgaagatctattctaaggcagttcctgatgcgactttcgttgatattgaaaacaagatgcgtcaggacaaccttaacttttacctcattgcgatggttagtagtgctaatgactactacttctcaccattcctgagtactaattgcgaaaacaggaaaagccagttggtgactgtatcagtgtgatcaatcttcaaggcaagctggactgcaagtatgtcgttgggttttactacagtccgaaaccccagcgtgccaatctcaaagagcgttggcctgagtcggtggaagagaaccttgagcgtctggaagatgctggtatcccttatgatcgagaaatcccaaagtgctcaaactgtggaggtaatttatactctcgcatctcaagcaaggaagatagctgatgagctttcaaagaaatgggtcatactgcgcgtggctgcaaggaggagcatgttgttcatgaacgtgtcgaagtgaagtgtgtcaactgcagcgccgtcggacaccgtgcccgtgactgcactgagcctcgccgcgatagattcgcttgccgtaactgcgggtacgacctttctctgttcatgtatgattgtgttgcttaccgtgcgcagatcctctgagcataaagcagccgaatgtcctaaccctcgctcagcagagggcgttgagtgtaagcgctgcaatgaaggtgatacaattcagtccaaatctaggcatttctacatgttgatatgtacatttagtcggtcatttcgcgaaggattgtccacaggcccctgccccgagaacctgtcgcaactgcgggtaagcacgaacgccctccttcctttcaaaagccttacctctctttctttctttctttttcagttttggctcttggcctgcgattacaacctaacagaacagatccgaggatcacattgcacgagactgcgataagccccgtgacatttcaactgtgacttgccgtaactgtgacgaaggttagaatcaatattccatctcgtccagggtctcaaactaacatgggtgtcagttggccatttcagccgcgattgtccgaagaagaaggactggtcaaaggtcaaatgcaacaactgcggtgaaagtaggttgatctacgataatatctctgaacagctatgttaacattaagtgctcagtgggtcacactgtcaagcgctgccctagcgccgtagtcaacgataccggtatgggcgataactcgggtttgggagatagtggcaaccagaacgcgaccgcagatgatgggtgggctgccgataacaccgggatggccgaccattcggaggcacagcctgccgaagaaggcggatgtgaaccaggttggtagatgttcagcgtgccggtcagagcatggcgtgagtcggagtgatcgtttgagacggtgtctgatgtcatcgcacgtgcacggatcgtccccatgttgtctgctccaggttttcttcgagctttgtccattctcggtctaatttggtgcgattgatggagtatggtagcaacgctaaattcaaccggcggggccgggaagagaagtcactcacacggaccgggatacaatcgggaaaaggaactactcctgtctcatgacggaaggacaccattatctgtttgcctcggtattagtgaagtatgaatgcaccactacaaaaatttccatctccatcattggtcctttgcattctggtaatactgtgtacagtgtatgctttagtagcgtagggctatcatgcgttatagttagcttaggcttcgttagccaccaccgacttgatggatgattggaagttcgatagccaagtaaacttacgcggagagggtgcgaagagccatcggccattgcccgaacttttgtttttgtgtaccgtacccatcaaaggaaccgagttaagtcaggagaaacaaatcccgaatccgaaaatagacaccagcaacacccccatccaatgaattagaacctttataaactgattaaaacaacaacacctcgacgaggtacgaaatagaaaaatatagaaaaataaaataaaataaaaagaacatcgtagtctacgtgtaaaggcaatccaaccaatacgacccaagacgggctgggcaagccgaaaacaaagcacaaggcatcccttacagtccgcatttaggcatcccgagaacattcttcggatcgggtagccaaacaacgtgggacaaacgtggtggttatgtactctgtatgtgccgatgtaggtatgcagcaatctaatcagcattggaatgtgagatgagatggctgtgatgtaaggggtaagtggtcatgttgtgatggtgtataggtgtaactatttgatttttgtgtggtttgaaaagatatgcggttttgagtctggactataggcgacgtactatgtacatacctacataggtacttgtaagtgtcggttcttggatgactggtttcatggacatgtacactgcgcgccgtatttgattaacgtcttcatggcgtaggtagtgtatatgatctacacgattacacagcagcaatacgagcttattcttgtattgatatgtgctgcggtgtagcgacaaacatgcaagggatgcctctcttgccgtctatcgggagggatccggtgagaaaactgggttgacgggattcttttttcaaattgtccttgcttccttgagcctctctcaattcatgcgggttgtgttgtctgtggttcttctatcaaattttgttttggtatgatagatctatctattcatgtagatgttgaattgttgtatagattactagttcgatctctctatttaaagctggtggatacccttacttcgttgataaacgatacatgtccttgaatatattggactaatttatttcagatttaatagaatcaatcttcattattactcattcaactagttgatgtatatcgcatcggcgattgggtaacgacaatatcaaaatgcctcggcttcctcggacacacggcggccacaggaggcccgtgacggttccccataatgaccccaacccaattctcaatcttccccgttaatatgaatttaccacagccattatactctaccccgacagatgccctgtacctacggtgtatcaattgcctatgtaggtaattgagatgcagaggttcgtgcttccaagccctttgcgcatcccgaacccagcaacacactacactacagcttagtgttctctcctaagcaaaacagacacctaatgccggccaagaaggaccgcgctacctagagggtacttcctttctcattcagtttagttgtaacccacccactcacaccatccgtcactaggtaattatgggtcaatatattttccggttgacacgctcattggatttaggaactcggtccggccggttctccctctgcacagtacatgcaggtggtatgagctgattccgtctgctgggttgatccacccgttggggataggtgcagttgacctggtagtgagagaaatgacttcttggctgcctgctcgataataataattaatgtagacatgcagatacgccctaccgtgccgtgtgtgcgatgcatctatttgtatctgcgatcggcatgtcagatttgatgtgggtgtttgcgtcagatgggttacggatcgccttgaacgggaatctggaattatcttcctggttgtccgtactgcgcgaaatttgagcgcgcgaaataaaagaaaataggtaatgggcatggatctggggccccatgacagaggagaatgctctggggtaacgtctataaaccagactgcagggtggccattgatatggttgcttcggcctcgtcacgaatataatttccaatgtaagagcatggaacgaacggaaatacccgaataggtaacccgagaagacgtctggatgtctggatgtcagaaacaatcacagtagaaaaatagttcggacagagccgaacgtctgtggagaggcggtacacatttcacgagaggcgagtgccagaatggggagaaaacggggaagggatccgcaggtaataatgactaactggatccaggttggagaagatctcagctggttggctgaaagccctttcaaagcgtgaggtccatatggggggcacgcccagtgaggtgcgcaggccacaacgcccttttgggaacgtgacggccgcccggcagaaccttaggacaaaacaatggcggctgaagaggaggcgaactttatacgagatccgtggtatcaaattcccagttcaaatctcaatcctggcttcggaggtcgtctacagagagtcattttaagaaattcttagctttctctgggcacagttattcacgagtcttgactgttgcttggtggtacttggctttcctaggatttttaattgatctcgtatgggaagggcttgagagcgcgccgagacgggtggcatcaaacaacaggctgttaccttttcatggcagccttaggccgatccttcggtggtttagtctctcggctatggctgggatcaagccggagagggtttctccgggccgggttgatttaaagttggatgctttcggcaggcgtcggcctggatcaccggacaaagaaaaaggttaaaaacaaagaaaaggataaaagagacatacagaacaattgtatctcttggagtcttggtctttctttaaactaaccacaaaaatcaaaacctccaaaccaacagtgctaaatgacgcagatgtttcccaccggtggttggctgattcttcgtttcgtacaattctcagattcaatcagacgacatccattcatttcgccgtgagagtggggaactcttcactggcaccacctgagtggattgacagacttagcgaggtagtacctagaggatgccagttttatctgacattcaggatactacgaggaaaccgaacaacctggataagtactgtaccgctagtcactaggacggaacccatctaacgataatattacgggattacatctaagcatcaaacaaccaagtccctcgccgggtctggaagtaaggcagaagctctcgatattaataacaaaattaaacgaaggatgcataacaagcgccacggaatcggtaatattagaatagattcgatatcgctgtggcggattgaggcgtccaagtaagggcgagggccgtgagctggcggatagggccgagtagtaggcccctcttcgcaaaatccggagacttcaaagtccccggattcctgagtaatcggccgagcaggtcaagtgagatgagcggagcgatgacgatggatggaccctctttatttccctcggagcctccactaagatacgaatcatgttctctacagttctaacactatctgtgtctctcgctctcgaccacgcgagcacgcgaaatctagtaatacagagcacatcaatagcggttgatacgatgcgcgcaaggcaggaaacccgagacggagacgggatctaacccctcgcaccgcgtaaataggatgaaaagtataaaagagaagaaaggaagtccagtggcgacctctcattagctaagtatatgatgaccggagaattgagccctcgtataaccattgaaccgagctttatttttaaccatggaagaagcaaaagaaagtgatccatgttggatatctcgtgcacggaggacccgaatgaaagtgttaaaaaaaaaaaaaacgattgaaacaggaaagagaccgtcccgtcggattatccagatcaggctagacagaaaagcggacgccaacccgcaatgctaacgccatgacggcattgggcggagtggagcagcaaaaaaagtagagtaacaaatgcgtcgttttttctctccgcgtttctgttcacttcattcgcctacccgtttagcccccgccgatcgactcttttgtggagtgtcgcccgacgaccaccatcgtcatactccggagtactttgcttcaagcatgaaagtgatggtgtgagagaaaagcccgatgttggggcccatcaaggtgcctgggagttattctatgtggggagtcggatccagttccccttcccttttggagcctcctgttcagccaatggaaatgtggtgtggaggatggagagtcaaaagcctggagagaaagacggggaaattggtactaacgccagactactacctcgatccagagtgagattggcacctgggtggagattctcttccatcgcaatcaatccctgtagcccaatcatgggacgaattgtaaggacttttgggtcgtttgcgataccaaaacatgcaaccttgaccaaattgaccccaaggaacatgtactttttcttagtcagaggccatgagacccccaagtcccctgtctgtttttgggcaaagtctggtaagtatcattgaatgtttgcctgtgcagtaccgtctgatgcgtggaactttaaattctatttagaatttatgaatttcaccctcatccgttttttttttattttttttaatgaatttattattattatgattatgattatttagtccccgtagccgtgccttctccagtcctttaccttgcacttataaaccccgttcattcccctgctgtcaccatcctgctgatcttcctttccttttattccgatttattcttgcgttaatgcatctttctcctctctttctttctccttaggtctcccttcactatcgcatgagactgccacttcctatcaccgctcacctgaagcagtctcgtcccgtttgggaatctagtccaattagttaggagggcacagtcgcaagagcttccaagatgggtcgcaggtatttgggccttcagggcaacgccctgcaaatcgccatcggtgttattgctggtatggactttctactattcggttatgatcagggtgtcaccggtggtcttttgacccttcagtcctttatcaaatatttccccaccattgcgaccagtggtgcgtactatgatagtctcacccaggccgaacagagtacccaatctactcgccaaggtaagttgcaccttttttaccacccgtggtaggagaccgctggagctaatgaactggaccgcaggtattgttgtcgctgcgtacaacttaggatgttttgcaggatctatcccgacaatctgggttggaaattggcttggtcgacgtaaaactatctttctcggttctttcatcatggtcattggagctctactgcagtgtaccgcgtaccagctgccccaactgatcgttggacgtctggtgactggattcggtaagtagcggaaggcgccaggggaaaagtctcagctaatattgaattgctaggaaacggcatgaacacatccaccgtgcccacttggcagtctgagtgctgcaaatccaatcatcgtggtaaactggtcatgatcgagggtgccatgatcacttgtggtattactattagttactggatcgactttggtttgctctttgccgaccccaatgaggtcgcctggcgtttcccactggctttccagatcttctttgccgctatcatcctggcttttgtcatgttccttcccgaatctccccgctggcttgtgcttaagggcagagaggatgaagcgaaagaagtgctgggggctttgttaggcgacggaaccgatcccacattcttgcagactgagttcacggctatcaaggcgaccgttttggagatggctaagggttcgttcaaggatatgttcaccatggatgaagaccgtcatttccaccgcaccgtgttggcctatgtcaaccagatgttccagcagatttccggcatcaatctgatcacgtactatatcccggttgtgttggaagagcagatgggtatgaccctaatcaactctcgactgattgcggcatgcaacggaaccgagtacttcatcgcctcttggattgcggtgttcacgatcgaaaaatttggtcgccggacgctgatgcttttcggtgccgcgggtatgtcaatctcgatgattatcctcgccatcacagctagtctcaaaacctcggaagccaacatcgcctgcattgtcttcctatttgtgttcaatacgttctttgctatcggctggctgggaatgacctggctgtatcccgccgaaattgtgcctttgaagattcgtgctccagccaatgccctagcgacatcgtcgaactggatcttcaacttcctcgtggttatgatcacccctgtcgctttcgataacattgactaccaaacctacattattttcgccgttatgtaagtttttcttgcagtctctgcagtcagacccttcgtactgaccaatcacagtaacgcattcatcgttccggttgtattcttcttctatccggagacaacccgtcggtcgctggaagaaatggaccgcatcttccgaaagacgaagagcatcttctcggtcgtgcgtattgcgaatgaggagcctcacatgtatggcaagcatggtgagctcctgcatacgctggatgatgttgaggatgaggctgtgcgtcgggctagtgtgctgagccacgctcacaaggagttggaaaaagacagctctgaaaacgacagcacgaacaaggcatgagctcaatgccacgtttctacattgatggtacaaaaccatgttttttgtctctggccgggctgaattctggaaggtcagaaatgatgccctgcacgataatatacccagcttttattctgtatttagctttttggtgctgcttgtaatacattttgatctgttgatcatctactgatctctctgtggatccactggttccactctgtccaatctgcgtcaacaaagctaggtgtactgcaagtaactcgcagccctacctgcctcgtcgggcttctaatctacctaacgactagcttctagaacatccgccaggcaacagaagggagttagggctgaagactcgggaagaaggtagacccaattggaactactaaccctatcttggattaatcgatatacttaacccagttataaggccgggattatctttcaagttaagaaaccgtcgttacagtcgggtagttgatgtccgcattcagtacttccaagagtagaggtgatatcggcgctaacctcgaagtagtaaagaaccttaattggtcgctttccccacactatcgtcacttctcttccacactcgtcctcagtgttaatcccttggcaatgtttatagacccaattgatgccctatcttagggtcaggctgctaatactatatcaaagtgatgacagagcctcagaatagcaagccggtgggccgccggaggcgaccgagggttcctgacgctttgcggaagagggccgcgcgagcgtaagtattcatctaagttttgactaacgaacgcatatgctctatatgttgaaagctgacaatttacctctatattagatgcaacccatgcaggtaccataaagagaaatgtgtagactttgttcatcacatattttttgctacacttgctgattactccaggtcagggcggaatgccttgcttgcgatgccaacggtacaagagaaactgccagtacagccaggcccctccgcagccagccagtaatggcaccacaaggtatggtgaaacaataatttgtcaaaaagttctttgtctcaacttacattaccatagagctagcacctccccgcaacgagactcggataagggacgatgtctcgaaaggatagtgcggcatttcatgggtgatatatcatttgagccgtcaaaccttcaattcattgcggatgctctggagagggatcaagtaagctcaaggaaaccttcgactttagcgccggggtcgagcgagctctattccattcacccgctttccacgaatacgatgagtaagttatggtggacatagctctttccccagatgcagaatatcttacctggaacccgtctacagtctactctggggaattctctcactggaacttctcacgcatgatccgccggaaattacaaagcctgggaaacgaccccgacgacagcatggtagtgttcttttgctccatgtcctcatgcgtatgctgacgaccgtattcagacgggagactcccacacagctcatgatcctttccgtgcaactggtcttcagtctcctagttcaattattgcttcagccaggaagtattttccgccgcgacatattgcagattttttgttggagacatttcttgaatacaccctgacgaattattactatttcgatgaaacagaattccggcagaagttagactactattatgctgaggatcggtacctagatatcaacgacgccggctggatctgtacccttttcatgacgttcgcatctgggactcagttcgcttacatgcatgctagccggcctccatacttgcagagtatgtccggtgaagatcacctacctgatgatactattgggctggcgctctataggttctcatgtcgcctgattcccgaccttattaccaccgcatccgtcgaaactgtccaggcgtttttgttattcggggtttacacaatgccgattgatacctccggccttgcctatacttatcttgggcttgccataaagatggctattcagaacggtatgcatcgtcagtttggagaagaaggtttagatgcacgcacgattgagttacggaaccgtctttggtggtccgcgtacgcgctggataggtgagagggaatacagtaacgcttgctataatctctaacgttataccaaacatagacggatcagcatccttcacgggcgcccggtctccgtgtctccaactgaaatagactgtgagatgcctaaagacatacccgaattgcgtccccctggccgggtcacaaatctacccaatcttactgctaccctccagctgactgagcagcttgcgaaggttgcacccatcatgtaaggaacctaatttctaaccgagtcattccatctgctgatcttttttaatggatatctagatcccggctgcgaaattgtccgggagagcttcatcagatctatcttacgcagcttctacacgtacgcgatgaactcaggagctggtggaccaccctgcccgaagatatacactgtcgtgacctggatccttctaagccgcttttccgctataatgtccacctggaactcacatacgctacgataatcatgtacatgggtcgtcccttgattcttgccggcacgccaagctcatcggcctctgttgagggcagctccgactcaaccgtagatgctggtgcaatgttgtgctttgactgcgttcaggctgctctccgaatcgtcgagctatgtcaattattacaggacacggtcggtgtagcacgagtttcgtataccgaatttagctcctgccgtgcggcgctcttggccattatcgcccagagtttgaacacacgaacggagcggctacgcggagcacttacgcaaggcatgggtctgatacgtcggatgtgtgttggccttcagtcagctcgttcagaagtagcagttattgaggcgcttgagcgcgcagcacggcgtttggacagccgagctgaaaatgaagacacagccactggcgaacaaggcgtcggatacaaccagtttaggcgctgggctatgctatggcaatctgagactccatccaatgtgggggacgaacccgaacctattggactcgagaatgcgcagttgccaaccggattttttgacggattcttctcttcctttcctcaggagcttggggcttttgcatctttcccagaaacagggatgcagtttggcgaaagcttgccaaccatgctttggcctgatgacttatcactaccagcgttccctccaaacccggatgctcccgtttgacggcgtgactgaccaaactgcaactgtcagatatgtgaactcggtttcttgagatctggtgacacagagatactttcagggtggaggtgacagatttcctgggagtagtagacccttcattatcgtccggaaacagagccctgaggatttgacgccggctatcatcaggtcaaactaaggagcatggaggatattttcttgtgtacaataccaccaacggaatcgttgcattcgactagcattggatgtttcaacgacttccgcaaagtctatcctcaatcatgtagaagttagtgtgtacgactaacaattgcgacaaatctcactaggttttcagctaccaaatacgaggcaaaataagggcaatgaggacatcttttccacgcgacttaaaggataccgattaattacaaaatcagaacaacgggcattggcactgtctcaattagtcctccatacaggcaaatttgaatccttctattcaggattgaagcttgaaactgggcccccgcacaaagtgtaacatacacaagggcctcatgattggatgatctatattaccgtagatgcttgttagttggagtgaccgttctggtagcatgagtgtatgaatctattatgttatgttaggggtaggcctccaattgtaatgatcttgacctgagcgaactcatcgattccatatttgcttccctctcgttcaagcccgctctccttgataccacctaatcttattgactagattagcacaaagttcacctggataacctcataaaaggtcacttacggagctgccacgttactaacagtgcccgtattcgcacccaccatgccaacctcaagcgcctcggcgacacggaacagtcttcttatgctccgagtatagatataagccccaaagcaacctcacacctgttctcctctcgaatggcttcctcttcctcatcgaacgcaaaaagcgctgcaacaggtctaaatgtcttctcggaggccagtcgcatatcatgcgtcatatccgctaacacagttggctggacacagttctcccccagatgtccagcacttgtaacgtaagatttataacctatgaataaaatgatattccctatatcctgccatattcgacgctatagcttatattcaacaaaatctactatgccttgtctactatccactcggaccgggaaggggaaccgggtcatgccgagtttcgaagtggatgtctgtatccgaagttgaaattggtaagtagtccctactaggatgtttgttgccgtactcgaggaatgcttcttgtgtgctggtatctggatgggtggacgtgatccggtggaggaaaatgctaataggtattagatcttgctatgtttgttataatgattgctatctctagtcgttatatgggagtactttgttcttccctgtgttttactctatttggatttgtttcttctttgattctctatttcctcgctacgtctctatttttgccttattgaatttttatcttccttttttctcttatacttttttttggtacttaaccagagcagtgaactagggttcgggtgcttgtacccgggttcaaagagtataaccacgttccagtacatgaatagctaacaaaaatacctctgatagaaaattcaaaaaagaaagatatcggatagaaagaagactgtgcatgcttcaagatttccaccataatagtaacaaatgtacaggactgacaaaaagaaaagcacataaaaagaatgaggcgcacccgatttgaacggataacctttcgatctggagtcgctgtgataattgttagaatgaggtttcttcatgtgtgaaagtaatggtaacttacaacgcgctaccgttgcgccagcgccccaacaggttgtaattttttgaaattttaacacttatcaatctgccgaaaggagagctatgtttacaacctttgtatgtacatacatctttgtatgctcaacaacctcatgtattttcccggaacaccgcacttgttataggtttttagcttgctgctcactcgaagtcttactccttgacttaacattaccggtatggtataccgggaagtacttccaaatttccaattcaacttaggtacattagctatttcgtggcctttcagacggcgtccgttggatttgggcggtagttgctatgtcgtaatagatcgcactatgtgaaaatatagcagagaatggactacacttacgacattcactacgctcgtcttgtagatagtaccatgtgaatcgacataagtagcttgccctagtgaaatatcaaaatcaagaaaaccagtctacaactccctctcaacagcatcagccatatcgccaagcgtatcaaacttccaatcataaaccgtatcctccaaattccccatcaaagcccccggcctctcaatccaagaagacttaagccccactttcttcgcaggatgatgatcatggaactgactctgcgccgtctgaagcacctgttccgcctcgaccccaaagtgttccttaacagctttcaacatatactcaaagttagccagattaggtttatacgaccccacatcctgcgccgtgataaccaaatcaaacggaaacccctgcaagcttccagcattggtcttctggaacgactcccggtccacatttgaaagcacgaccagtttgtagcgcttcgacagacgcttcaatgcctccacagtatccgggaatgcaggccactcgccaactgattcaccgaagcggttgctttcttctgcggtaggagggtcaagggccaggcgagaggcgatttgcgggtggattgtggagaggagttgtgaatagggcatgcctggggtcttggtttgttgggatttttcgagctcttgatagagcttgaggaagtctgatcgtgttatttgcgcgttgttggaggctagggttggttggattgcgttccagacgccggtttcccagtcgattagggtaccgtagacgtcgaaggagaggaggcggtagttggtgagcttggacatggtggtttatcttgaggttttggctttggaggaatgggagaatgatcttagttgttggatggcttcttcttgttcttcttggggggttttatatgtttgatatgcgacgggctgagtgtgtatagtccttggcccgggtgcagttacccggccgtaattcactgcggggaaatagtacttcttctcgactcccggctcgggtgttgattcttgtcaaattatcaggtcttggtatatcaaacttgtagccggtgtctctttacttgacaatgacttgtatcgtgagtcactccggatgacgaggagggctcggaaagctgtcagggtcgttgttttgatcaaaagccggctagcatgcatgtaagcgaactgagtcccagatgcgaacgtcatggaaagggtacagatccagcaggctacacaagtctgcttcctaaattcaatctgggcaagcaaaacattcactctgtatatatttgtgtatctctaagttcgaagatgacggtcaaccctgaaccatccgtaccttctatgcagacggccgttcctggtccgttaacaaatactactaagtcggaaatagatgacttacgccccctagtttggtcgacatagattgatactccgtctttcaagtggccccaggcctcttgatgactggggggagatgcagcaacttggtttccagttatattgtcagagcctcatgatgtggacttactgaaggaccaatagttcacatagagggttcccataatcaacccgtcaaatcatgtgctatttgtcggcgcttaaatcttgggatagtattgggtagtagtatgtcgccagcctcgcgacaaaataaatcagaatacactaggaactaattcacactctattgcagcttggtcacatttagatattcctcgtctaccagtcgttattctatcatgggcatagaattatcactagtgagacggaccccttggtgtctgggtcattatgactttgctcagtatctataccggatcgcccaagtagatctgagaccagcgatgaagcctaatttctccgaagttgctacatagtctattacacctagccactgccttttttgcaatgatatcgcgtatcccattttgccgttttccctttatttcggagggtttatgttttgttagcccctaaactcgtacccgtccgtccatttatccttcccgaacaagtgccttaagttctaactgtacatatagagttatgtctccagaacccgccactggcaggctccgatggtcacgctctattattatcaagttgaccaaggaaattcgtgtgggctgtgataaaagatcccagatttttgttgtcaaatgcttgaataactccaactctccttatgtaccaattgatcaaaacatggtcgccaaaatatatgatccactctatcatgacttctctttcaacgatgaagacccctttcttggggtcgattatgactacacccatgagtgtgccgcttatatgcatctgtcgaacctgcagggctcagttattcctagatttttcggttcgtacaccttgacaataaacttgggtgagaattctcgccatgttcgattgattttgatcgagcatattgatggtctctccatggatagattgaaccctgaaatgtttccaagggaagaacgtcaagagatcatgaaacaaataatcaatggagaatcttcactttacacgaaatatgtcttgcacgaggatctctgcccaagaaatatcatcatccaacgaaacacaacattgggggtattcattattgatctagggaagtcggttattggacgatcgcaatccatctaactccaaaaaggagaagcaataccatcctggcgttgcaattagccctctactcagatggaatgtcgtttatcgtcgccaagcttactttcacgaatggattgactggccatggcaggcctggcttgaggctcaatacaaggacaccgaggcaactattacagcggaacaacgggaaatatgggcaatcgaagattggatgctggaagcaaagggcccccctcctatagagtaggaattcatccagggcatcatggaaagcacgtgggaacaaatctgtttttgattagtagacattttgactgacagctcaatccttattgatctcaatgactcgacttcttagagcaagagtcgtgtgatttgctatacaggtgctttactcgcagctgactcgtagttttgtgcctcagtataatagcagccttgaagtaaatactcatcccccggataagggtcttaagcacacaagatccaatgctatctatgtgcttcatgtagctcgcgagattacatctatatgtgagtcaaatattatgatctactatgaccaacatacataccttctcaaagccatattaaaatctctattcagggcattccttccaaacacgaaaccgctcttttttctgtgttttacctgtgaaatgtaggaggttaatggtaccaatcatttggtctgaccttcttgaaattagccttcaagatcatccaagctgtaggaaagcatgccgatccctctaatttcagcctggtcacatttctaagcgacaatcgctggcagtcttgggggtggtgacctttaggccacgataggttagcgtagggaaccattgtcgactagggttacggtcctccagggattccattgtctgagtgtctgaactgctgcatcccgggtctgattccgaatccgaatccggtcgaactctctcaaaaggacggtcttagataagaagggcgaaattggagcggtgagcacgatacgtatacaatcgttgttgttcttttgtacagtacttggagtagatttggaaaagtgggtataaattatataaatatcgtctcgggaacccacagatcaacatcgaattaatttcgctctgttattgtttgctcttgtcgcctatcaattcaattctaaagaggattaagccgttgagttgttaatattattgttattattgagaacaaaaggagagggggggggggaaagggaaaaaaaggaaaaaaaaaaacacggacaagaagcaaagttgggactagtgtactttgggcgaaaggctggaagaatcgaatgaatccataggcccagacaaatccgctcaaaaagaaggtgtcaaaatgccgttagcaccaaatgcactgcttacgagtttacataaaacagcaatacaatcgcctgacggacacctgactgacggatcacggtttccctaccgttttgtttttcttctcccaataaatcctcccgcttcttcgttgcccaacatcacctctacccccgtttcccctatctcaatcccatcgtctcccctacaatccctttttcttaccccctaatacctttttgtatcgcgatacttcatccttcttcacaatgcgtgagatcgtaagtttgtttggggcagtcacggagctcttcttttccccactcctcccccgccgttccatctccaacgtgatcaacatgacaatgctaactccctcaaggtgcacctccaaactggccagtgtgtaagtaaaccacttgcaatatttgatggaagataactgagtcatcgcgctctttttatagggtaaccaagttggtaccgccttctggtaagtccaatattgatccatccttttcacatgcttaacaggcagggtgtttttaatggaacgcatattgacgtttttaaggcaaataatctctggcgaacatggcctcgacgcgtctggagtgtgagtaacatgagctatgacgtgacggacttctcctaattgattctcaggtacactggctccaacgaccaagaactggagcggatgaatgtctatttcaatgaggtagctaagcttctctaaatcgtgtgtactactgccgctcaccaatccactaggtcggcaaccagaaatatgttccccgcgcggtcctcgtggacttggagcccggcacgatggacgccgtccgtgctggtccgtttggacagcttttccgaccggacaacttcgtattcggccagtcaagcgcgggaaataactgggcaaagggtcactatacggaaggtgctgaattggttgattctgttgtggatgtcgttcgtcgtgaagccgaaagctgtgactgtctgcaaggattccagatcacacactcccttggaggtggtacgggttccggtatgggaactcttttgatctcgaagatacgtgaggaattcccggatcgtatgatggccactttctctgtggcgccttcgccgaaggtctcggatacagtggtggagccatacaacgccacattgtctgttcatcagctggtggagcattccgacgagacattctgcatcgataacgaggtgcgaaaccattattttcctaagtgaagatgtgttctaatcaacgtaggccctctacgacatctgcatgcgcaccctgaaactggcttctccttcctatggtgaccttaaccacctggtctcggcagttatgtctggtgttaccgtcagtcttcgattccctggtcaactcaattccgacctacgaaaactggctgtgaacatggtgcccttcccccggcttcatttcttcatggtgggctttgcaccactgaccagccgaggggcccattcattccgcgcagtctccgtgcctgaattgacccaacagatgttcgatcccagaaacatgatggctgctgctaatttccacaacggccgctttttgacttgctccgcgatcttgtaggtttcctccgcaattcatgattgcaaagactaactatgattcagccgtggaaaagtctcgacgaaggaggtcgaagatcaaatgcgtggcgtccagactaagaacagcggatacttcgttgaatggatccccaacaatatccaaaccacggtctgctccgtgcctcccaggggcctgaagatggcttcaaccttcatcggtaattcgacatccatccaggaattgttccagcgtatcggcaatcagttctctagcatgttccgtcgcaaggcattcttgcactggtacaccagcgagggtatggacgagatggaattcacggaagcggaaagcaacatgaacgatttggtgtcggaataccagcaataccaagaagcctctatcgatgatgaggaggacattggagagtatggtgaggaggagatcgaggagcagtagttatctcgtcactattcgcggcacgcttgggaattgcaagaccctccttttatcttattacatactttggtaatgatagtgcaaaagttgctgccatcctgaacatttcaccttctatctggtcttgccgtgctctggagcttctaagagctctttctttgatgaaattatctgtgtcatatatgtatccatggtatgccaattgtcaatccgtggtaagtcagggttgctatccacatagatacttaactagagggcgatcagccaaatatccatcgcttatatgtaacaatgcagcgacactgtcgtactagcgcttccgtacctcaccctataagccttacactataacagaaaagggagtaggatagaacttagtgtggatgcaattcccatccgccgggacgcagcggctgccatgatctttctaacctgacggaaaaactgatatctagcaagtgattatgccgtggatagacaaaatggctacgaagctggcccttcttctcctgccttttgtaaatgcgcttatctgggctcaacaggccccaacctgcctgtccctgccaataacgggggcctgagcaatcaggctgcgtgctgctctggaaccggtcgtgacgaggaaatcgtttgcacttaccagagtccaggttactagtgcgtagtctgtaagtaaactgcggaaaatataatagaatactcgtatggacggactcacttacagtgcactcttttcccatgtgaacctgggttttatatgtacgtagactgtaatatatacattggttaaatgctccccggaaggtcagtgggagaatgtcatagacagggagagttggagtttgtggataaatcaccttggttcctgtaatttagtaactctgaagctccacttcgaagtaatgtaccgcttgtgcatgtagtgaccataatgacgggtcatgttcatgatcatataaaccagagctgtagaagtacatactatagtatagcactatggccgtgtctatagtgatagtcgaagaaaggtacagccttctgcgccactataaccggtatatgagggttaggtggtttctttatatcatggccccgcaagtaaactatttcaccatacaaatagaacatgaccatttttagaggtcggggatatcagttacagtttgtggccaccggcctatcaattatggaatgtgcacagggtttcaaaatcaatattagtgacagctacaacaagacttcgtcaccaagaagactataagggtgcatagaggtgtgtactaccggctgatattatgcaagagatatcttaagttatcaaacagctctaatggtaatgatacatagggatgctttcgataacatactgtctattgattatccatagtgtatcacttcaatacaaaggtcccaaactcgggcctttcccttggtccatgattttagagaggttttcccgattccaatccgtctgctctcaccatcttttgtttccacgatcattacattggcaaagagagcatatctcagtttgccgtaaatgggatcgtgattggtttcctcggcctcggagggattgttacatttttccctcgttgtataatcagtcagcgtagagccatcatcactgttgatctggttcaatgtgtccacatacacagatataggggctggcctgcggaatcacgccagtatgatagctcttcgccaaatattttctcgcctagattgcgtggatgatgccaagcggttttagaatgtgggtataactccaaagacatagcaagaacatcaatctgaatgttaggggtgctttcccggatcctccaccacgattgcatatccagtccacaaccttccacaaagacactgcatccatcctccttcctgctacgcaagcttctttgagtgtattgcttaaccaagtcatttgaactggacaaattagattgtcctttgcaccgatctctcttgtaatttggatgtacgaatgcattttcatctttaacgaaggggtcgtggcagcactcgaagtaaaccccatcattggtgaagaataggagtcgaggagagagaactgcctcttgcaatgtccaacctcgggaggcccacactgcaaaatcgcatgctttagtatacgtatctggctccctaatcaagtatagaccctgtgtctctaagattggccatggggttcgtttcctcatgtgcacaccgggcaagtcatagtgggcattcactcctgccaggacaaccagagtgacaacagagcaactatagatgacatccatggcattaacctgggtgtgtttatcctggattgcgtcttgaaggatgcagagcctatctgtcccgagatagcgaaggccaagctttgcacatgctaccattgcatcgtggaatgttgctgttgggagattcttatatagatatcctttcttctcaaggttagttatgttttctgtccttgctgaaagatcttggtctgatggtttcccccatacgtagctcaaactagcatacttgcaatgcggaggagccatcacaacgcatccctcttcaacatcgaatacgcgcatttgaggtattatggttgaatcagcctctttattaacatcgcccttatggttggcacagcagtcctgaagccagtcacggataacaccccagttaacgtcaggttcaggttcaggttgcaacaaccggctgttttttgaagtagactttctcagcccataaaatttgcatccaacctatttctgtgatttcttcattagcgacgagattctgggtagagaaacaaaaacgaacgccctgccactaaccatataaggtgcatactcggatttgaaagtctaccccacgctcgaggtaaaaaatcctcatcttcctccaagttcattccaatgatgatgctgggatcctctcttttatcgaatctgtggtccctttcaagtgtctgtactaacatgcgacagaacccacagactctggcacattgccgcgtctcttgaaacttcccgatcctcaatttgagagacctcaacctacgacgattatatctttgtgtgatcggttcgtctcggggattctttccaaacatgggtgcaatccaccacatggccaagtcttaggtgtcggcaatactcccaaagaaattcgctggagggttctggacattgactacactcgccatggaacaaaagatgacatttgtaatttcgtagatcgggtggcaagatgtatcccaagacggagacatcttcacaatgcgcgcccaagactttgcagcgagtacagacagtgagatattcttcgtctcagtacgtgccatccatcatgatattcaggagatatcagggcaattttgatattgagggaacttggatcgatgagctgggctggtgtgaagttggccaaatggccaagaaatcaaggcatggatgcataataaggcaccaatgcagtctgcacttgggtacggtgtggaaatgcacggggtctagctcagactctgacagtacaactttgaaagctatatattgctgaaagatagactcaaatagattattttgtagatttggtatctagatagaatgtatgtagataaacagacaagatatagcttagagagtcatgaatgaagtggggttagatataacaataaacagatcgagattatatagtaaggtaggcagaactggcgattctctctgccaccgtgacaatcaagccctttctttttttggttctagaagccgtacaaagtttcagccaaccttaaacgagctgacaaaagcttgttcagcttgctgttaactagatatcgctgcggcggacgtcggcgagccaagaaggggctgtctttcttctgaatcagagagaaattgccttcctatgtgctgataatggttgatcttcttctccagagccgcaattcgctcttgcagtcggcgacattctttgcaaccctgagattgacttgacttgatttgttgatcttttttagctagctctgcctccagggattctcggccctttttatgtgtgtcgttctcggatctgagttcctggagctcttgcgtttgcttctcaataagtaactgagctgactggtaagaaagagcattagagatcaagtcgagatgactccatatattgagctcgttcccttgtctctcaggaaattttgacagtaattcatacgcttttcggtaatcagcaatggttttcaccaagctggcaaataggtcgtgcgccgtgccaaaactcatgcattctatttgcgcactggcccgctccggctgcgaagctttagaaggggaattgcctggattggctttgggcagactgataccctgcatcgctgtagtggtcggcacaggcttgttattgtgagcagagcccatgaccctctcagtgcccctggtttgtttagcctggctaggggactccgaagctgttttatccgatgcacttgtctgtaagcttgtggtatttctggaactttgagatatcggctgtgttgcgactgtttgggctctaagctttgccaaggagttcaccgaacttctcgttcgaccatgcatggggctcgactgcatgcttgttagcaattctattcgattctggctagacgggggtggacatactgagccatcctcatgaatatctccgttatccggagattctgggtcttcctcaggcacataggtcgaatctctctcggctgtcctagcctgtttattggcccgttcgttgacagagcgctcgtcaatgtttggccgtttgttaggtctgttggtcttggatgggagtgtcgtctcattgctagtgttattggtctgccatgggacaagggcccggttaagcaactgctgtttctgtttatggtcgagggatggagtgcacaccattgcgttgtccctagtatgcttcaatttcatatccttgtaggtgcacacattccaggtcagcaaacctcttcgacccacacaatccaacaaaaacatcaacaagagaagaacatagagatgccaataggggatagatctaaacgaagtagtacgaagagagggaaaagaaaaagggaaagaaacaacacaccgaataagccttcgtcaaagccatataggaccgtcgtggaaagtatatctagcagtaaagcaatcagcaaccccaacatccacaagcccagggtacctgaacaacaaggaagaatacaagactcaccttctgaaactgatcccaagcaagatgcttattacgatcacgcagtcgtaccagctgaagtcgctcttcttccgtccagcgaccaccgcgactcaatcgtttcctcttggttttggtctgcatctagaaagaaaagaaagatcaatcaaaattcaaggctgaggcagcgagatgaaaagatgggttatatactgtgaggctgtgatctgtgctctgagaggaaattgtcctttccttttggttatcatcacgttatcataacattgtgtttatgctcctccccgagtattttttcataaactcactttgtaattcatagaacggctataatttctttttggtttttttcttttttcaaaagtacaaggctgcgaaccaaaacaatcctaagaacaaagaaaatcgacaatggttgcctggagccttgtgtacacaatccacacaccatcgcagcctcgtaccagtcataaccctgttcaaaagtacggaaataagattcaaccaggagagagaggtggaaagggccacagcgaatagaagcatgttgtgcttggatgtcgggggagaactgatacgacgatagtgggactaggatttagcttggtcggggaactggggatgggtatggtgtttttgtttgttttgggatttgtgcaggtgagctctttttgggggagtttgtggtcagattatcatctccttttttccctttccccttttgtctttttactcttgtgggtcggtgttagttgtgagatatttgaggttgttggatgatgatagggcttgagaggctggaatggatgtatatacatttatatcaatatcaatatcgtgtcttcttttgctataattactcatctaaattccatgcagcactcacaatgaaattgtctacactgaatccagtctgtctttgttgattgcattgagagccacgtaagatggatactaggatggatagaaccaaccccagcctcgtgtgttgaccaacatctaatccttgtcggtaggctgagcacttaagtaatagtaataacgaccaaagccgctaatgtatgtactgcggcacagtcactccctattccatggttcccgacataagaaccctgagcgtcatgcgttatcttctcaggctagtgccctcgttatttttgtaaatcaacggggtgggttgcattgaccttttcgctgagattgttggtttcaggtgggttttgttgggatgcattggtctcgtaaagggggagagactttggggtctgcctcgataagaatttgtttatctatatgctgtttgttgatctgtaagtgtctgttttcaagtgggagagacaagttcagattgcgaatagcagggggtagatgttgtgatgtatgggtgcctggggagaggtcctagtacagtcatgagtctaatagcaagaatccttcctgttaaacgggctgagttaggaccctttcttgtggatgtgtctcatgtagtgttgacaagtcatgttatgtttgacatagcttgtgcttatatttgtagtcatagtgtttgaaaggagtcaatatcttgcaaggaatatgatccagtgatttcaaaccaaaccgaagacctgaaaaatccctcataataaccaaatgtgatataaagatgaatagagagaaaaaatgtgagataccaaacatgttgcattcgttttcataatgagaggcacctgaatcttagaagcatacataaagcgcacgtgattttaaaaatacatccagatgtataagaggaaagacagccatacaatgcacacagttcaagacttgctttgtttacttgaagagtctgcccagcagaccccccgcgatgttgttcacaattcctccagtcagtgcccggttggcgaaggtggacgcttggctgaagcggtcgcaccgtgagaaagcaagggtattggtgatggtcaagatgagggcaatagctataccaattattatcacaaaccgagcgtgacagaagacaaggcactactcaccaaccaagctcaaccaaataacactgctcagtctaatgatggccaatatcgccaggccaacccagagcgcaggcgtcacatacaagctaagccagaagaatctcttatctgtagccgcgatcctacgagttgttgggtccgaggattcaaatacccaatgcgagtcaccactcgcaacgttcacttcgttccaccaacggagaccaaccaagcgacgtcccgcgatgtttttgaggtaatagaagtccgctgcgaggagaagcagcgtgatgatgaagaccaagatactatagattcaggttagactggatcggtcatatattcaggggcggaaatctccgagattacccacgaggggtcggtattatattgcaggagtgagctgtgcaagtgcgaaataaaggcacatacaaattcttaataaataataccccgaataggtacatcagcagggcactggtgcggaagcccaggaaacaaagcaacgtaatcggatgcgcactcaggcgccagttgagatccccctgctggggttcgggattaagggattgttgctccatggcgacggagaaaaaaaccttagtatctaatacagggcaagcaagaaagctagcgacaaagacaggagcatatacgcttacttggctcttctcaggaagaatagtcgacagggcggaatgaatgcgatgatgttgcgtgtctccatgacagggcggtgagtgatggcagaatacgggcggtggagcttttgatacgcggttatttacgtactactgctgctttgatggactgataagatgatctctcatgtacggacagacattaaatcgattgatagtgtgaagagagtttacctgcggtgcgaaatgttatgttagcttcaattgagcgggacgcatcatgtttcccctaaaaataagcttatggatgtctccactgatctcacaatgtgaaatctagattccggaaaagcctttatggactgtgccgagggaggaaaataattacttctcaactgccgccagtcttcgctctcctcaccccgctgagacactgccggactaaagagaagcaagatacatacaaagactctttgaatcgctcacccccaagcgacaatggcatccaggaatgcgctccgtcgtgcactgctctacagtacacctctcctcagctcttccccgcatttcacctggtccctacaaaccatgatgattgcaagcgcactaccacattgcttccacctagacagccgtcgctgaccataatctatccagtcccgggctcatcgcagcgcttcattgacaaatcacgcacattaacagccgactgcgtagcctacgacctagaagacagcgtgactccgcacaagaaagcggaagctcgttccctggtgcggagagctctcgaccagcccgcaccctcaggcatccgcgaacgagcagtccgcatcaactccgtagacagcggtctagccctagcagacctaacagaagttgtatgcatattttcaaaccttgcttgtttctttccatttcaccagcttacaacgaaacagcttcaatcccccaatctaagcacagtcgtcatcccgaaagtaaactcagcttccgacctaacattcgtcaacgacgtcatcacccacactctttcccagcagccccagtcccaagatgcctcctctcgacctcctatctctctcctggctcttgtcgagtcggccaaatctttgaccaacctgacccagatatgcgcctccactccactccttcagggcctgattttcgccgctgaggatttcgccctcgacctcagccttacgcggacccccgatctgactgaatttcttttcgcccggtctatgattgctactgctgcgagggcagcgaatctgccctctactatcgatcttgtctgtacgacttataaatcgactaagggtgatggatccccgcctgctgttttggaagaggaatgtcgtggtggcaggcagttgggattcaatgggaagcagtgtatccatccttctcaggtgccgactgtgcagcagatctttggcccggattcggatgaggttcagtgggctgtgcgggtgactattgcagatgataaggcggcggctgcgggtcgaggtgcttggacgttggatggaaagatgattgatgtcccagttgctgaaaaggccagagcaattgtgaagaaagccgaggcctgcggtttcaatgttgaagaattgcgcgagaagtggcgcgaccaggagccggagtaaatattaatctctgttcctactttatataacgatcttttgctgcaagcctcactaaagtcaggaaaaagaactacccacggagacgtatattgaaatagtattttattactagccagcctccgtggtgaagtagtaaaaggagacgggcaaatagctggctagaagaaagtagatgctatgcacaggaaaatatgattagagatttatctatttcattccctgaattcctgcgtatattcatgtacttgctggaattgacgtccaccgggaacttgcgtccagactgcgggaaagccactgccgcctgcaattccgattcttagatagagggtgggaggtgggcacaccattgataccgtaacaaatcatgaaggcgagttgtagtgcacagcacgagtactgttccttccactgaattcatatattgtaaggccttcctcaagtgtattttagtgtttcacctccaaatcctcccgcttcaacagctggatcttgcccatcgtcagcacgggtgtatttacccctgcacccgcatttgcatcagcactgtcttctagactcttagctagagatctgtcgtaactcgtgggatcgatgcctaagatcccacccacataccctcctctttctccaggtacgctgaattcacgaaataggtatttccactcgttcagccaagccttgactgcctttcctatcttgtctttcccattcttagaatggtggcctgtgcctgtgatggcatagataacacgccggccttcattagcatgcttgaggaggatcttctccaggtattcaattgcttcctcggggtgtaggccatgcagatctacatagagctcttccaaggaatcatccaggccggcattgactatgtgtttatttcgttcttcgtataattgccgcgcggcttctcgatggcacttacgcatagcttcgttctccgcctgacctcggagagataaagcttttgccgctctagcgtcattacgattccaggcctgggccgcacttataaagacggtcagcttacttgaacgaaggtacatctcgagacccttacctttggagaaacttgttcctgactgtgccatgacggatggcttccgtacggtacttgatatattgttggttggctcgtgagcctgtctcaagccaagggatgttttgcggcggtgggatagactgggtagcagcgctgttctcgcggcccttggccccttctttgtttctggatgtggtcttgcccttcccaactgcgggagatggagacatgcgtacgacatctgctaatgatgtaggcacactatctttatttgaattgatttcacgattatgcgcgccgcgtttaccatgatgtttcttatttttggcgctgacagcagcaagtgtaggaaatgcatctgggtcatccacagacggagcggctggattcaattcacgattctgatgcctgctaccgggtcgggaatgagggcgagacccatgtgttgaacttccatttcgtttgcccgtgacaagttgcattgattgcggaacacctttgcctcccagaagacccgataaatgagctggatatttgccaatatattggcccgcccattgatcgcccactcctagcgaggattgcaaaggagggaatgcttcggaggcgctatctatgtggaactggggaccagttgagccttggtgactgccgtctgtcacgctgagattcgcgacgagcgctgaagggtcgtgcgaaaaagggcaaccgtcgccagccaaacaattacccataacccagtatctataaacggagggtaacatcgtcagtaccactgtatgtaggaacacgtctacatagccatcgtcactcacttgcaaagatgattggttaggtcgtggctaaaccggcaatcggcgcggagacattggccagttgacaaccaatacttgcagaccaccgggctacggatttggcctggggagcttccaggttttgcttgctccattgccatagattttccgacaaccacgcgggtgccatcagcgtgatggacaaacccatccccatcatggccttgagacaaagatgcgattgtcgcgcctaaatcgtaaccgtttgcctcgagggcggcttctatctcatcgtttgtccttttatctccgagcactgtgcgcaaaatatcatggggactcatatccgggacaaattcaggggccgtagcgctgaggcccatggcgctcagtgtccctacagaggaggtagtactgttggcatcgtcggctaccagccaatccacattgctgtcgctaccaaaatcaccatagaaatcggacacttgggtctggtcggagaattcgtatgcgttcaaattcggggagtgagggatcggctgggcaagagcgagtctgggtgacgggcgcggggaagtaaaaggtgatactgtagaggacagcgccggtcgcgagaagccgcctcgtgagttaggaagccaagaggtgctccccgggctcgtccctagatttgaatggggtgacaacggcgtcgacgaacggcccatctgccagggggcgggagatgagcggcgaatgactgtatgccggggaggaggaggagaggagcctggaagggtgcgatttcgatgcctccataggacgtcaagcacggcattttctagggatgaccccgacaaagaggtcttctctcgcaggaaatcctcagctttctcggcctgttcttcctcgtcgaagtcttggccttgaagggattggaggcagtcctccaaaagctcttctgaaatcatattgagtggaggcggtcatgcaactgaggggtgtcgataagggggggagatatacgcggtgtaaaaggggcggagggaaatgaggggtaagaaagcgagttgaaatagaggacaagaatgagattgtgcaacaccaccacaagctgagaagggcgtttaacattcagatatcattgttccctgtctgaagaggtgatccagtgtataatcatggatggaacgagatgttcgatgagagatgttagcaggatgcgacaggaaacgggttatagaccgcaagtaatcgcatcgcatctgaacagggaacgatcaataagggaacatccaaggaataaagaaatataaaaacaagggtagcttaatgggagaaatgaagaagcaacatgcgaagaaaaaacaagcaaaaagaaaagaaggcgagggaggagggagttgtcggatgtagactaagtagtaagttggggggaaaggtacgcacgcttacgggtgtcaaggtgggaattaattggggggaggaaacatatgtttgttcaagagctctggctttgtagattatttgttctccaacctgaggctgtggctccagtccggccaccaattctccctctcgatctttccacccgattaagtgaagcactaaactagaagggaaataggtgtcagtatcattggatccaatcgattgatatagatcaggtgttacagagaaagagaggtgtttctgttttattgaataaatttttaaatgagctgtgcatactccttttattatttctttctttctctgctttagtatgttatttgtttgacccgattgattgtttcatagagtttgatatatcaggtacaatatagccttttgcctttttgactcccctttcccgtcccagaaaaggacgctgggcatgaatgtgggggaaattgaacaagctgctgcctttccatgaaatctagactgatggcaacccagagggttcttggcacgggcgataacccaacaggatcactggtcgatctgccgatacatacatatactccttatcgggtacaaccactgatcatcaatcttgggtgcagactgcatacaagcaagtaccaaaaagcacggtagctatatttaccttatatctacaataatgaagaggaatagagctttattcgaatgaatatatagcatagagtctaaataaccgcctgataggtaaaatgaacggagtttcagtaggtaggtcatagtaagcatgtctgatactgagtacaaataataccgtaccgggggtacacatgaggtaatggggtgacttcataccgtacagtcagcgactgcttgtgccaattccattaattaaccaccaaactaatagcactgcctccgtttcactctcaggcagacaaactgtcgttgtctttataggggctctatgccacgtttcaactgtcatcgtatgcttttatctacctgctgttgcgtctgaagattcatcatggctatttagctttttcctggtaaatctttcttccttttccccaccaattcaggaacgccttcctgccatttggacttgttgcaaaacaccgaaccctttccaacttcccatgtatcagctcacgctgggggcatagatacgccctcgctaattgatcaacagccagaaacgaggcgatctaccggggactactttccaattctaaaacacaacaataagatacacgttggtgttacgctacgcttccacgtaaccgtcgtcgaactccattggcttgcgaacccttgttctcggactgtctctccggctttggaataatcataacacaccctcttatactcctccaagatgcctgccgactatacatctactgctcgggctttgtctctccccacctcgccttcagaatcgctatcacccgcagacaatgattcgtatccgccatggagtcatttggcatctggcaggagcaatcccgcccacccctccgagcgtcctactctctggaagcaggtcacccatcggttgaatgaaacatcgcaacgaatgatggcaatttggcggagattgagtttttggcagaaagtaggtgcagctgcagctgctttgcttgccaatctccttggaattgggttcctggttttcacaggcaaagtcttcatatggcttggccctgtagcagagcaatgggagcaatcagtggtggcatacactgtcctctggttatgtgtattcttcgtctcctttccaccattagtggggtggtctacctttggtaccatatctggctacatctttggggtatggaaagggtaagatttgcgtctttatccttatcttagccagcccgctgacatccttaatagatggtttctgtatgcatctgcgactgtgctgggatctacgtgttccttcgttgtttcgcggactatcctgtctaagttcgtcaacagaatgatggagcgcgataaaagattcgcagctcttgctttgacattgaagtatgacggactgaagttactgtgtatgattcgtctctgtcctttaccgtactcagtatgtaacggtgctgtttcgaccttcccgaccgttcagccattgatgtatggacttgccacggctatcgttacacctaagcttcttgtcccggcctttgtaggcagccggatccgtttactttccgagaaaggagaggagatgagcgcaggttctaaagccgtgaatatcatcagcatcatcgtaactgttgcgatcgggattttcaccggttggtacatttataaaaggtgagcatctctgacagattctctttgcgaaatttgaaagctgacgtggttgccaggaccatggcacgagctaaagagttagaggctcaagaaagagccgatatacgtcgatcacttcaggccgatcatgctgaccgtcgccctcaccattccttctctgaggacccagatgttaacactgccgccacaactcttgctcgtgatgaggaggagcgtctcggatttcacgatttcgatgacgataatgtcgatctggccattgacgatgagagcggtggcgagaactcgcccagacttcaatccgggggtccctaccgggatgaattcacagataatgattctgacgacgtcttcaagaatggagatggcggcgagggggagacttacggcctacatacacacgtgcggaagagctgaaagtcggagccgcatttgctttctatataccgcttgcgatagaggtaattgccacggttcatgtcctataagaggatcgtttgtgcgatactgaaagtttttggggagtttggcgttctcgattgtctagcccataccccaatctcccgtctgtaatcctatcgatttgaaaagagctctgttcgcgtaagactcagtaagagaagcgagatcactcatagaaggtaaacaagtatatatatatgcgcctatacagactggaatttctggagttctcgtagcctacctatttggggctcggccgctttcgtgagggtcaatactcagggtttgtttactgagcagcttacctgctctttattcggtatatgtaataagtaactctcgaatttggctaagtctgtactaatacctacgtaaaatggtaaatagaaaaccaacagcgactaagtctacctcgaatgatataagtatcaagagtaacagtgatcaaagcaaacaatgaacaccggcgaagctataaaatatgtttaataggctatattatgccactctagtactgaaatgttaggtaatagggctcaagcttgatatcactatataacagaccacggaggcagtgacttggcagttctagggttccagtttccattacaaaatactatcttatagcaacttcttcggctgcaatggagcaattaagcacttgtcaacgggtaacaagccatcctgaagactagtaatcgattttgtgggctcagaacttgatctatctctgcttagcgcctaccagaacatacgtttgaaggtttcgcgatgtatcactgatcgccttaggtttacctcatgttagacgtctgacagatcctttctcgtatgttccatctgctgatgaatacttattatgctctggatacctccttcccaatttcttaacaactactagaccatcggtaggctcttctctcatcctagatacatatgcctacttacattcaaaaataaaacatatagttctacacctacgctcgcttctacacaaacacatacatgtacatatatacacgttaacaaaacacggcatcaatcggttctgctcgctgtgcaaccctcacagacttcccggagctcctctaccccaatacctgtggtctaccaacctatcagcgctggaatgcgacccaagacccctacacgaccttacaataatgctgctttgaagtaaatggtaccaccggctactttggtaaggagagttgtgccgcctactgcaatgctaccgagagtactcaaggacaattatctgcttgcctttcgcaatcttatagtgataatgagcttggtttggttggtttttatgtattgaggtctacgagaattgttggattatagaatattatatagttgtttccttgttttgagatattgccgggtcttatagactttttatactttattgccagtttctagcacaatcgcatatatatattttacaagatctggaccaggaaaaccgactatgctgacacggtaacctaaggtcttgttctcaagccagttcatcactggatctgatattggttattgtgtttacaccgatattgcgaggtagaggttgttctagtcagccttccattactagtggtgttgtttttttttatcccaagcccgatattatcgaatcccggtttgtcacggttttcgagaaagcagacgaatcgcataaataacgaagctctaggtgtctcaccgagtagccttttacaactggtatcaagaaaatgcagtcatcagagttgcatcatgcatgcgagtgtctccgtacagtcgaagcatgcgagcgctagccgtcttcagaaacactcaagacagttcaattgaaatagagtgtgacgggccagtgcataaaatcctttcaatccacctgaaacgcacactatctacgttctaaactcggggtgacatcggtgttgtactgcatattgcgtcgcagcaaatacttgctaccacatcatctggtgatcattcaactgccgtatcccatattgtaatgttctgcaagtaccgggcatatactcatggcgagttcctacgggccacatcttatggggatgagctcgaggtggtgacagacttctatcgacctcaagttcctcagcagcttcatctctagtaaaaagccatgtataaaccccgacatagcatccatcacgatgccccgaaggtcagagacattggcggaacctctcccacagcgactacatctcctagaccctgtgaccaagaatctagagtagcgaatgctatgctcttaaggtacccatgctttcgccgtgcctgaagattttccaccacctcatgacatgcgatagagaacttccactggaggtgcgcgctgtgggtgggaagtttgtataacaacgcactgaaacaatagaattagtagcgagcgagcacacgccaaagtcggagggtagccatcgcccctggcgtccgagcggacttatgtggaccagatcaagtatatataacaaggctcgaaagggctaaacagagctatggctatgaatcgtcaccatgtcgctgatttaggaatctctatgagtaaagggtcatttcatggcaaatgacgtatcgaccttgttggcttttaaccctgatatgggatccggagtcgcttcacttcggggaaccgccattggagcgggaagaagtcagaatatcaagcatgcatgccagtaaagtattcctgcagaatcccctagttttgcgagggattgttcaccattactgttttgtcagttacagcgtcatcaggtatgcctgacacatttccgatgacaagggatcagggactgagtgagagaagattggggaagcagagaggaagtgcagcctgcagaatgtggcatgctttcggttcggactgaaaaatacgcatgggcccttcggcagtaccaaatcaccatcgatagcctcagagttcaggtttcacatcaccctgctatttaccagagtcctggcactctttccctcgcctttattggcaattacccccattgactgttggcttgctaccgtacactgtcatcctctagggctgcatcggttgtagaaggaaagtgatgggttcgggtagtcagtatctttcttgccctcaataacccctcgaactacatttcaggtaagtcaatggactcctgctccatgtgattcgaggtttttctcatgtccaataaccgtatctttagaagtttataaacaatcatataacatttttctgacattatctgaaggaatttcgtatatccctatatcaagcttctctccttcccgccaccaacggctccggatgagtggacccacaatggatagaaacgctgagatctgagattactgtattttcaaacgatggaagtgctatgtctattggcagactcagtatagtataattaccttctactgagctgggcaaaagtcggtctcattgctacaacacataccctgacacaatggcaccccttgccagcaatatgggagccgcagcttcgatgaaaacgcatggccttaatggccaatcttatgagattaccactcatttagaccaatatatcccaacaaacattagcttcaatggtagcggtcatgttgccctactgccatcaaaccaaactttgccaaagagcagtctgcagttgaacgctagcgtgatgaaagctcatgcctcacatctggataacaacttcaatcaagccagtgtcacaaatctgtattctgtcccaaacagcaactcaaacccaggccttcgggtaggaagaacgtctttagagggggttgactctagttcccgaagcacagattatctgtctcaggatgctcatgcaactacggcccatggtagatcgagcgattcgatcacgactacttcattcctgtctcaaccgagtcaaactaaaccaactccatcgataacaaacatcaacaagctctcttcatcttctttggtcacagacactaaaaacgcagatagcgtgaatgggctcccgaaatatcgccctagatcctccataccctcgagacttccagctgcagtttacgctcagcaatgcgtctcggcagcttatgcatctagactcaatccgtacgcattgcacataaaggagcaggaagcgttgcaggattatttgtgtcatctgcacgtcacggtatatctgaacatacggaatggtatacttcgactatggactcgaaatcccatggtgagcgttaccaaggaggaagctcttggatgtgcgaaggactaccgttggatgaaccttgcctctttcgcgtatgaatggttggtacgaaatgggtacatcaacttcggctgtgtcgaaattcctatgccttttgtaactccaaagaaaggccggcgcagggaaggtccagtggttgtcgtgattggggctggaatgtcaggtcttggttgcgcacggcacttggagggtctgtttcagcattatcgtgacgcatccacaacccctcgggtcatcttgttagaaggaagacgcagaattgggggtcgtatatactcacatcctttgcgaagtcttcagacatctaagttaggtcccggactagtccctaaggccgagatgggtgcgcatatagttgttggtttcgaccgtggtaatccgttagacccaattattcggagccagctggctcttccatatcacttgttacgcgacatctcgacaatttatgacatagatggttcaccggtggatgagattcaggacgcgatggatgaaaggctctatgacgatgtcttggaccgttccgggttctatcgacataaatccatcgtcgttcctaccgcggaaggcgagcgggaattgattgattcaggtcgcgatttgtcaacaagcgatggtgtcacagtaagacaatacgaggaagcaagggcttccggtactatcggcctactgcttcccacaaagcgtgtccgccgaggcgtaggtcataaaaccgcagacatcaaggcgcctggagcgtcgggcgcagatcttgcacgttcggaggagcagccagctgctttaacgtgtcaattgaacggttggagattgaacgatggtatcccagctaacgctactttaaacctggaccctgtcgccaaaatttcgtcgtctcaaacgttaggtgctgcgctagacgagggcatccgccaataccagcggatgctccctctatccccaaaagacatgcggttgattaactggcactttgccaatctggaatatgcgaacgcgactaatgtcaatagacttagtctttccgggtgggatcaagatataggaaacgagttcgaaggcgagcattcgcaggtagtaggtgggtatcaacaagtcccgtacgggctattctcattacctacaaaactcgatgttcgaacaaacaagatagtgtccaagatattatacgacccatctggaatgggcaaacaaaatacagttgttcactgtgaagacggcgaatcgtttgtggcagacaaagtggtcttcaccggctccttgggcgttctcaagcatcaatccatacagtttgaaccccctctgcccgaatggaaatgtggagccatcaatcgactcgggtttggagtaatgaataaggtgattctggtgtttgacgaaccattctgggacactgaacgagatatgtttgggcttctgcgcgaacccacaaatcgaaacagcactattcaagaggattatgctaccaaccggggtcgattctaccttttctggaattgtctgaagactaccgggctccctgtcctcattgctcttatggccggagatgccgctcttcaggcggaatgtacccctgatgaccaaatcatcggggaggtaactagccaactccgcaatatattcaaacatacggtggttcccgatccattagagacaataatcaccagatggaagtccgataaattcactaggggcagttactcctacgtggcagcgcaggcacttccaggagattacgacctgatggccaagccgattggcaatttgcactttgcaggggaggcgacatgtggcactcaccctgccactgtccacggggcgtacctctctgggctccgcgctggcgctgaggtgatcgaatccatactaggacccatagcactaccgaacccccttgtaccggagaagggaaaagcagaacttagcaccccaacaacagcaggacaaaagcgaaaagagccacacatgtctgtagcatcatccactggcaatactcccaccaacccagcagactcaacctcacccacatcagcccgtcaacaagcctacgaacaagcaatgtggacatcagtccaatcggaaataggccctcccatgccccgaccagcaagaacaggcctaaaccctttcctcctctaccaaaaagactactggggcatatgccgcgcccaatgcgatgaagctcgccgggcggcaacgaacgatcccaatgctaaagctgctcgcgatgagatccgtcatgagctcgggctcatgtggcggcgagccagcgaggaggaaaagcggccgtacatcgaacagacagaggtcaaccgacagacaaatgcggaaatgtggagtcgatggaaacaacagatcgccgagtgggagcagaaggctggcgaattgaagacgaagtggtatgcagctaatccatttgcaagttggggaatacattctgcagatactgctgtgccgacaaatcacttatccactggtgctggtggtactacttcgtctatttcttcattgggacagcatataaacaactcgcgcgatcagactcaaggaggaactattgctgcgactgtccatccccaaacaaatggggtacaagtgaacggctcgttgcatacctcttgattgtcgagtcattaagactaacctggatgttttgctcctatcatgattgcacgagttgatgcataccatgtgagatatatgctcttaacgatcatttcttgtattaccaaatgaaaccagacttcaatcaagatcctcgaaaattactctatattctagtctattgatatgaaattcatagtttagcgacccatgaaacatgcgcgccacgagtatcatcgaaggaaccgaaaaaaatgtattgaacttcccatcacaaaccgaggaaaatgaccagaacgctgaagtctaatataaacaaccatcaaaataggcaaaaaggatatatccgtaggacatgaaacatgatagtcagccggtgtagggcagatctaggtgtgatgaagaggtggtgatgaggaatcttagatcaggtgtggcgggacggggacgtttagaggagagggttggacttgtactccgcggtgttaccctgggggtcttgcttgacctcgttgacgggagcctcctctccagaggactcagattcagcgatgaacttctcagcctcgagagcggcaatgcagccggagcctgtaaaagactgttagtatatgtgacattggacggggacgtggtagggtcatgacataccggcactggtaatggcctggcgatagcgtttgtcctggacgtcaccgcaggcgaagacaccctccaggctggtgtagctggtaccaggcttggtgatgatgtatccttcgtcgtcgaggtcgatcttgcccttgaccaaggcggtggcggggtcatggccaacagcgtagaagagaccgttagcgtcgacggtctcctcctcgccggtgacggtgttcttgacacgcaggtgggtcatcaagcccatgggcttctcgtcacccaggacctgggtcgcaacggtgttgaaacgaacggtcaccttggggtgagacaggagacggttggccatggccttgctggcacgaagcttgtcgcgacggaccaaaacggtaaccgagctgccgtacttggccaggaacatggcctcttcggcagcggagtcaccaccaccgatcacatagaggggcttgttacggaagattggcacggcaccgtcacagacggcacaggcgctgattccgttctgccagtacttggtctcaccgggcaggtcaagacgacgggcattggcaccagtggcgatgatgatggcatcggcagtgcgggcgggctcattgtcaggaccatcgttccactccgtccacagcttgaacggcctctgcgagaaatccactctcgagatagtctcagtgataacctcagttccgaaccggacggactgcttgcgcatgttctccatcagctctgtaccaccgataccatcagggaagccggggaagttctcgatgtcggtggtggtggtgagctgaccgccagcagcggtgccgttagccagcataccctcataaaggacaggcttgagctccgcacgcgagagatagatcgcggcggtgtgtgcggcggggccggagccaatgactacggaggggaccaagttagtatctctctttgacctcggcagcatcgtatacaaaaaaaaatgaggaaactcactaacgactttgctgtgcaccatcctggttgctgaactttgactgacgcgcaagggcgtcgaaagattattcgttaggactgaagcagacggagaggatttctggtgcagagacgacgcagcagcggctgtcaatccgagtgaggaccgaagggaggaaaagggaagtcgtcgagaggcgaaggaaaacagcttgacggtgttgggagggagattgggaagggaaagaaagaaagtcgggtcgggaaataggcggctttaattatggcgttcagggagagcgcagagaaagaggcgaagaggggctcagattgccgggtggtggggacggtctgacgaaaattgggctggatggttcaagattagctaaacgttcacggccaagagattgattgattgaattccctacgtagaatccgtgtggagacgatgaataaaccagtttagtgacaaagaatggaattgcataagaatcccacggaagcgacttcctttcactctccgaccaggtacaggaaaaaatattacggatgggcgacggcgagaccggatcacgtgcatgcttagaaagcagtcacgggccgagaccgccgctgattatcgatcaatcctttatctcggatcaatcgccggaatcttttgcattcaggcaaaatccagaatctacagtcctataatgtatacgataagaaggatcgaggcacaggaaagactcatcacattcacattcacattcagagggtatccactgtatacaagtagtagctcatagatcttacattcattatcatcatatttttgtcgtcaggatcatcatcgtcgtcatcaatagtcgtcataatcatatcagatcaaatcagatcaatcggctcatcggccaaaccacttcctcctcctcgaagtttcggcaacaccatcatactctagttcgcctggattagctaccgggactattgtctccggaggcgcgtctctaccggcaatgtattcatgctcacggcccgctgagcgtccatgattttcatattgatcatgctcatcctcgtcttcctcatcgctgaatccttcttcggcttcggtgtcctccacattctgcttttctctcctacttctccgtacactcaaccatcgcttccagcccttcgcaactggcgccgcaggggggtcgtactcatttccttcgtatcgcagcatcggcacgagcaacttgtatggggtcgtaataccggatggatccttcgggtttaattccatgttcaaggagatggccaaccccccttctaaattaacgaaggcaccaaccccatcgtctccctgctttgcagccttcttagacgctttctggctcagatttgtaggccgtcgaaggaatggagctgggcgggaatctggcggcggtggaaagtagctatcacctgtctccgcaggcggaaatggaccatccatactcatacgccgcccaactgggttccctccaaggttaaagtccttagtcggtggccgcccacgtcctgagagtcggcgtaacaggccgccgctaccctggggtctgtccccgcgtgtcaaggacagcgtcctttgcaacttgcccggtcgaggctcctccactggcggtgacgattcagattccggtgttgtcggtggagtaaaacctatgcctagttagcaacgtacaaaagggccaataagccaatgatatcagtactgacctggctgatacgcacggatggagcaccagtttcggcgtggtagcaatcgcttgttattccgtggcttattattcacatcttgtgtaaagatgggtatcatgtcctcgtccgtattagtatccagatgatgaactcggttccgtttgttgagcgtgtctgacaccatctccgtctcgggcatgtctgcaatagcggaggaaatgatgttgggcatgtatcgatagtctttgtccttaggcaagttcaatctcgggttcgagtagaattgaccaatggcagccaaatgcacatcgccgctggaaaagatgcttgttaactcggccctaaaagatggcagagtgcaatctcatacctcaaaatggtcacacggacggatttgtctgctgccaagtcctgcagatcttcaatcaagtattggcgttcagacttatggtgtttagctgtccagtggtcatcaaagatttcaactttgctcccactcttgttcacaaaaccgccaaatagtccggctttgccgagcgatttccggctgtttagaatatttttcaccatcgcctgtgagaaggttagaagggaaagaattgcggttatagcgcccgtgacataccaccctaggatatgcaactggaatgctcagcagcactagcaagtgcttcgtctcgccacggacaatttcacggtggcatctgtcccaaactagatcacaagtctgttcgctgagtacttcgtcattctatgatatattattagcaccgcttttctgctgctaaacaggtactgtggtctcaccatgcgttctgtccggcaatctaggccaagaagagacaccccaccacctagagacatgaacaaattgcggcttcggtggctgatatacggtccaggaagagccccaagcagccaactaggctcatctgcctcggtctcttccggaacgctgtggtgttggaatagcaagtagtatttgaatgctatgttgccaagccctgagattacgggcgtgctcatgaactcatcggggtaagatccgaagccttcgatgatttcatggtcattccagaggttaaccatgggaatttgcgagttcgcaagggagtaaagcccctgtgaaaaccaccgtgaacagtgctcaagaaaggagttttccaactccgctttgaactccatgtttagcggcgtgtcgtacttctcatggatatctttcatcttgacccattcctggaaaaagcgtgattctgctgtaatcttgtcgttgaatatctggtctcctccaccgaccatgacatggaatgggcgagtctgatgctcattgagcacgtctcgccacagagggtctggaccacagagcttattagagtcgacgcctggggtaaagccgttacatgtgtggtacattatgttcatcgtctgccccctggcgggcacccagaatcccagagccggcccttggttgagacgatatgcgattcgctgctgtgtatttcctaattcaatctctatattaaacctccagaaagtgacatctcttcctggatcggcgtagaggcgggcccccgcaacctccttgtagaatccagcggtttctccatccatagaatggactctgttggctgggatgggttgcttgataccctcactgctgtagtcaatgatgctgggtgacatctcatagatgccgtcgtcattctcaatgcatgagaggtccagctcttcttctgtatgatctaccggtttaacatagagaggccgaccatctcgcccagatttcgtaagtccagctgtcgggtccacatactcaggggctagtttagcatcctctccatttagttcagtcggaggaggagggagcagatccattggctgagaaaataaccttagagtaggtggtggctcatatgaagagagagaatcccttgtcacaatcaacacactacctctccaagtctccttatcgaatggcccattgggcccatcgattcgcacccgcttcaaccccccataacggagtaaaggaccacatttaaggaaaaggtgtggctggaagcgcatattcgctatatgtcacacttaatatcagtcctggaaatctgcaatcttgggtgaacatatcaagggataggacatacccgaaggcttggtgtttggtggcttctggtagttgtttggcagagccctactctttctgcggttgttgcttccgccgccttcccaccacgccttacttttattgacatcgaaattttggtagtcaaagtcagaagcacccagtcttgccactggtgctgttttccactcagacaaaggtggaggcgttggtggtgggacatcgaacgaaacagtctgccgtttaggtttaggctgtgacgcaggctcgctctcaaaaatttgagatgtcattgtggcattcccacctggctctcgacttgaatcggagtgtgcaggcatagcattattagtagacccattcccagtcgcgtaggcattcgggtccacttgctggggcacaatagccgctgtggggagctcttttcttcttatagcttgtggcactggtctggaccccgacgttgcagggcttagatatggcgtttgtcccgcagcagggacaggataccggtgggccgggggagcatccgcagcgtaaggaccgctaatttctcgcggcatgttcggtttcgttgattgcgggcccagagcgttatttcctgctgggtggctcacggacacagaccgtttgggagcattgccagtcctgacaactcccgtattctgggggtagcctcttacatgatgcggtacattagcgggcaatggcactggatgttgtaccgatgatgttcgcgcgcgaggaggttttgctctgtctgaaggaccttgagccggcctttgacgcggtagagctggctgctcaaaatctgtctgctgagaaacttctgttagagggctcgaagtatctcgcggtacagtaccctgacgagattgcaccggaacagctgcgcgactgattttttcagcttgctggcgtgccatccgttctttcaccctcatctcagcttccatgacccgtgctcgtttctcctctttgctgattccagtgagtgccacttcaagcttttgaagaggtgaccgatctgccgcccaatcatgcttttgctctgccgtggagcgtaccgtgttagagcgactcaatggtgattggtgactgtctctaggtgatgggaccatatgagggtcatctcgcttcaccgaacttgagatagaaagtctagaatcagttatgctgccccgtgaagtagcgtactcatcgggtgaggcatatgactctggtggtaatggcttttccatccagttttgatgtccttcgcaggacaagtctttggtcctcgcggagaacgagcgagaagcttgatggccacgagctgcagcagggttgttcttgtaggacaccgctcgagtctgcgggacatcgacagatccgtaagtctgatcgctatcagtttcgtaatccaatgcggtaggtttcatgtcgtgagactgctgccgtcggtgcgatggtgcgcgtggtacactattcagagggacggattggggaggtattgagcctccattagtaggcctctgggagctagctgtagccatccttcaaagctcccggattcttcacgacacacactacccagaaagcttccgtactttatcaccggtaaaaatcaaatgcgcggggaatagaaaggttagcgacaccaataaagatcgtaaaagaaatcaattcgtatccaaatttatgatagtagcagatgatttgaccagaccagttcgtgttagtacatggtgatggcactggaagaataaatcatcgcttaattcgcagagttgaaagttgcggagtagtatacaagcgatgtagtatatggattgtaacaagggtggatttgtacagtatgagaggaaggtaagatgatcgaataccgcgatttcaaccaggggggaaaagaatggaaaaaattaatgagatgacagaaaaatcaacaggctaacaggattatattggagtgacgaattaatctcattgtgctggctaatgagaattaagtcggtggctggcaatggcgaaccagcacagttccatgcggggctgactcgtcagtcatcctgcattaaacatgctcccgccaggcaccacgactggctcacgttcccctttttctaagaaaagaaattagctattagctttcgaaggagaggaattatcggactaggagcatgaaagggtacctggatagaaaacatgacgaaaagtatccatcgtgctgtgtcagtaatccgtgtataataataagtagtactgtagtcgtgttgcagcagctcaccgactggatgcatccgctggtgaatgagcaaatcatgaatgcaccgagtcagcattgagcatagtcggttttagtaacattgtaaagaagataatggcattcttgtttttgagacatgtttcccatccgctgtccatcatgggatgtttcatttagattctccaatcggcggtgtgatcagtaatcttatttcaacatctaccgtagattcaatgctgcctcttagagcaattagttacggttgtgaatgggccgagctgttgatataaaaagtaattccgaggggactgttgaggcattttgaaaattacggagcacatacatcgaagggggtattgtatggaccgcgatctagatctgcataccgacttcgatttcacaatgttgattcgtctattgtagtcgtcatctcattttattgtacatacagtaagaaagggaaaactcagaataagaaaagaagtcaccaaaacagggctgaatagtcctttcaactctttttacttttttttaggttcttagtaactgcctcccgtccatgttacttagtatacggagtacttttcatatcatcccttcacttgaagtcagaggggttttggctgtaaggagtagaggcttagctgctgataagtcaaggaaggtactctgtacagtgcttattagaattttgcaagaatgttcatctagtcgaaatctgagacgtggggccaaaatcttctagagtatgtactgtaattaattaatatttagcactgaatgaaaaggctacctgagcactacgatttaagtcagtggagaacaggttaaagttaaacaatgaatttgtcgcctaaggcaaaaggttccgctgtttccccgaagtgaacaccattctcgaactccgcctccgcaacaacttcaccgagcagtgctcattgaatacataaccatttcataccccccttgctgtttatattgcatatttcttgtctttatagtactcttttccttgaagttgctttctgaatcgcaagccatctactgaactgtctggtactgttcttattgatggcaactatcttatttgtcctcatctcgccttactactgataggagcctatctcgattcacgctactcccataatgcggctttccgaaagtgcaacggtagcgttcggccttttttgtgccgcgacggcatcagcccatcctcgacgctcctacgagacgcgcgatttctttgctcttcatcttgacgattccacctccccagacgagatcgcccaacgcctcggagcacgccacgagggtcaagtaggtgaactcacacaacaccataccttctctatacccaaggagaacggtgcagacctcgatgcgctgctcgaacatgcacgaatcagaaaaaggtcaagtcgtgccgaaggacgtggcatgacgttggacaaggaaagagatttgagtggtatactctggtctcaaaagttagccccaaaacagcgactagtaaagagggctcctccaacaaatgtggcgtcgagggggtctgtgaaagaagaggaccccgtagctgcccaagctcagaaacggattgcctcttcacttgggattacagatcccattttcggcggacagtggcatctttacaacactgtccaggttggccatgatctcaatgtttcggacgtctggttagaaggtatcaccgggaaaggtgtcatcacggctgtggtcgatgacggactggacatgtacagcaacgacctcaaaccgaactactttgctgagggctcctacgattttaacgaccatgtaccggagcccagaccgcggcttggtgatgatagacacggcacaagatgtgctggtgaaattggagcagctaggaatgatgtctgtggagtaggcgttgcatacgacagccaagttgccggaattcggattttgtccgcacccattgacgacgcagatgaggctgctgccatcaactatggctttcagcgcaatgatatatattcatgctcttggggccctccggatgatggcgccacgatggaggcgccagggattcttatcaaacgagctatggttaacggtatccaaaatggccgaggaggcaaaggttctattttcgtctttgcagctggaaatggtgcagggtacgatgacaactgcaatttcgacggctacacaaacagcatttacagcatcaccgtcggcgctattgatcgagagggcaaacatcccagctactcggaatcatgctctgcccagttggttgtcgcttatagcagtggctcgagtgacgcgattcataccactgacgttggaactgataaatgttattcacttcacggcggaacttctgccgcaggcccgctagctgcgggtactattgccctcgctcttagtgcccgaccggaactaacttggcgagatgcccagtacctgatgatagagaccgcagttcccgtccacgaagacgacgggagctggcagactaccaaaatggggaagaagtttagccatgactgggggtttgggaaagtagatgcatattcactggtacagctggccaagacgtgggagctggtgaaaccacaggcgtggttccactcaccgtggctgcgggtgaagcatgaaatcccacaaggtgaccagggtcttgccagctcatacgaaattaccaaggatatgatgtatcaggccaatatcgagaaactggaacatgtcactgtgaccatgaatgtaaatcacactcgccgaggcgacatcagtgtggagttgcgcagccccgaaggtatcgtcagtcatctgagtacagcgcggcggtcagataatgcaaaggctggctatgaagactggacgtttatgactgtggctcattggtatgtatttgctcccgtaatttagttttcgttgtcagtcctgacatttccattcaggggtgagtccggtgttggaaagtggacggtcattgtgaaggataccaatgtcaatgatcatgttggagaattcatcgactggcggctcaacctctggggactttcgatcgacggctccagccagccccttcatcctatgcccgatgagcatgacgatgaccactcgattgaagatgccattgttgttaccactagtgttgatcctctcccaactaagactgaagccccacctgtcccaactgatcccgtggatcgtcctgtgaacgcaaagccatctgcgcagccaacgacgccttcagaggctcctgctcaagagacatctgaagctcccaccccgacgaaacccagttctactgaatcaccttctaccaccacctctgcggatagctttttgccgtccttcttccccacgttcggcgcttcaaaacggacccaggcttggatttacgctgcgatcagttcgatcattgtattctgtattggccttggtgtctacttccacgtacagcgacgaaagcgtctgcgtaatgatccgcgtgatgactacgatttcgaaatgatagaagatgaggatgaaacgcaggctatgaacgggcgttcgggtcgtacacaacgccggggcggcgagctttacaatgctttcgctggggagagcgacgaagaacctttgtttagcgacgatgaggatgagccttatagggatcatgcccttagtgaagatcgggaacggcgagggagcacaagtggtgaccatgctcggtcatagtttggactaggctttgcatttgcttctaccctataatggtactccttcggcgcgttcccgctatatcagatgagatgtgttacatggatattgtgaattactgatgttgaacgaaggctgctgtatataattctgacttgattgacaaatagactcataaaggacatgcataggggtatcgtaaatagctgcaaagcgcgctacaagtaaaaaagtggatggggttgatagagttgctggataagccagtcttggcgcttgggccgatgacgctggtgcggcctcttctccaactgccgccattgactgctccactgctgcctccgcaacttctcaacctcccatttatcaatctaccaccagcaaccatagctcctcatatcccgaactacgctatatctggtctctccggtgatataaattgcgtgcgagtttcttttgacttgtacaattacctgtgtgaagttgccgcttccctaacggcaacccctcgatggatcagcacgatgactttgacaatgtctcatggagacacgaacctgagagcgacatctctcgtcctaccacttcgggtactgatgccgaagagtcgcctgcgactagtcacgatgccaatggcaagcggagaatgagctcagctcatgaaaacccacaagccgggccactggcagatgcggtcgatctagcaggtatcggggatggggtgttggaatgccgggtggattcgcctctgaaagaaaatgacggtactaaagacgcatacatctcttatttggttacaacacaagtgagttgccccgtttccccgggagttacctgcggcttgttcatggcagtccactgtactgacgggagagacatcgcagaccgatttcaagtctttccagaggtcagaatttgcagtgcgcagacgatttacggatttcttcttcctatacaagacactctatcgggaatatcctgcttgcgcggtcccacctctacccgacaagcataaaatggaatacgtacggggggatcggttcgggcccgaattcactacacggcgtgcgtggtcgctacatcgatttctaaagcgcttggcattacatccggtgcttcgccgggctcccttgcttgctatattcctagaatctcccgactggaatgcgcatatgcggcttcacacttctcgcacatccaccaatccgtcggacaacagcggtgcccccggaatttttgacaactttaccgataccttcgtaaatgcgtttacgaaagtccacaagcctgatcgccggttcattgaggttcgagagaaggcagataaattggatgaagatctcaatcacgtagagaaaatcgtcgctagggttgctcggcgtgagtccgatttagagaccgactataatgagctcgccacacaattccgcaagttggtgtctctggagccaaacgtcgaggttcccctacaggtattcgcggcgtcggtggaggagacgggacgtgggctcaaaggtctcaaagatcacacggatcaaaactaccttggctcgctccgggatatggaggcctacattctgtccctcaaggcgcttctaaaaacccgtgagcagaaacaactcgactttgaagccctagtggattaccgcaacaaagccgtgagcgagcgcgactcgctcgccaccaacccatcatcctactatgcctctaatcccctgacctcatcgcctgcgtccttcatccgctccaagatggaagatatgcgcggggtcgaccatgagcagtcacggcgggagcgggtccggaaattagagctgcgcatcgacgaactgactcgcgaggtagaatctgctaagaccacgtccgagatgttcgatgaagaggtcgtccgtgaagttgcggatttcgagcgaatcaaggcggttgaattccgggacactcttggagcgctggccgagaagcatattgacttctaccagggagtgttgaatacatgggagaggtttgtcgcggagatggaaggtgatttagatgagaatcacgaaggatccgccccccaggagagtagtacaacacgatgagtgtgtggatgatatctttgatatgacatgaacgagtgatttatgtttcttcttatttgcgccgcctcttgtccgcttcgctttgttacctctaccctgttctcctttttcacgaacactctgccactgctccatggcagtttacgttatcgtagcttacaacccggcatgatagctttatcttccttgcagatatcataaaccaatcgcactaacacccttagaagaagcaacagtaatgcaatgcagaagcccaaatccagtcacctcaaccgctccttaactccctcgtgctccgcacactcgaaatccaccggcccaggctctccctgcggatccaaaatcgccggatccaaagccctcgtagtcctctgccgaacacgttcctattcaagaaaacacaatttcaatccatgagggacacgtcatatcgtagatgataaatcccgtccttcaaggaagaatcaaaggttcaagaaaaaaaaagcaatcaacctacctcccgatacacctgattcggcgtcttctcagcgttcctccccgccgttaattggaggtaaacctcatggtcatagcccactgctcctttgcggttgttcgcgaagttggcactgaggtccagggctgattctgctgggagattcttgctctttttggctggtggggttgtagttttggttgtcgttgtggaagtagaggatgtcattttttgtttcctgctcctcccttcctttttcctttctttcttttttgcctggagtttattgagttttgcgtaagttgtgtcagatcttcgcttatgaaggcgagattggttggttggttaatcgaaatggtggtgggagagcagttcagtgagggtcatgcatgtttggggaggaaagtaagtgaggctgtgtatagatggaaataggcatcaatcacctgagggagaatgggcgattacgtggcaaagagaatggatttgaagaatgagatcctttttattttattttattattttcttttcaatgtttgatattcgggatatgcatcggaagattagcagggtgtttgcagaatatacgccattttattttaaactaatatctgactactagtctatgctttttgatcctacttctaaacgtcagagaatccaaggggaacttttgtattctaccctgaagaaaatccctagcggggtttgaaatctatatatagcatcatccactagacccatttgcatcacgcccttgttttcagcgatatcttacttaaaagtccaagaacttagttatgctgtactattgaacatgggtactatttttatcccggtggcacattcttcaaatgaggggtttgagtcgcacatggttagacacaggggtttgtttcagctttctgcagactgcattcttgagctagagaatgtatcatacataccctgtttccacaataaggatactactacccaactacagaccttattgacagtgcaggtggacaatctgtatcaaccaccagtaaaaccgacatacacaatgttcttattcaatgaatgacagctactatcacgaaactccaccagtctcgtaccacttttgcacctcaacatcctctaggtttcgggcgatatgcagtcagcccaacccaattgatatccgtggtaactatccaacgtaagctggctccgacaaagttgatgtgtagtagtgatgcatattgaggtaactcggcctcgaaaggcacagtacatacatgcattagcgctaaaatcggccatgctcatggatgatctgtttaattgggggtttgccaagaaatatagatgtaacgtactccattctgatacattggctggggtccttgctgcatgcagtgttcccttatagctccttttaatatattcgtctttggactggcttattctccgaagcatctctcgggaatggtcctatagggtgggaaatagggcgttattccgggaagatatccaggttgctgacggttgcgattgtcccgtgttgtcgtcgtttgtcaatgtgtattgggtctcgtccaggtggggagggattacatctttagagatgggggctgatcttctttgagtgtcattgaggggtatgatcgacaatggagtttgactgagaataagatgatataggatatagatatgatactcgtaagggccagtcatgccagctctgtctacccgatatcatagaaagatgaatattcatgatatgcaatgctacactgtgacatgatcagtagcactgaaatgtcaagccacttcacgatcaagatataaccgtactccaagatagttactaattgtactacgtactctaaatacccatcttcagtgatgaactgcagtagaagccatacacgccggccatctccaccagctatggctcaaaacttgcaaacttaccccagaaagtggcgaccaagactaatgaaactaggaagttgtcggactgtatgatcgcaaaggacaaggttttataggaccagtccacgacaatgagttcattctacaagcaggaagcggtcgtggacatgctcattgttgtgtagctgacatctttggtgctaaagagcatcaacatttagccctgatgctaacaagtccataaagcgacgctaaaagcctagtattctgtctgaaattgcaagtaatcgtactattgtttgacttagcacgcgcatcatcgctcggtttcatatatttgggttcagaagatgagggtaagatatattgtccagctgtaacagaaccggagctcttggcctcttaaacttgtttttaagccaatattaatgtccccgtcttttctcttcattgaatttgaatatgataacaggttcaatatgccataagaatcgtgaataccgcctagccagggcaggcagaatattttacttcgggcaggcggtacgccggaaccctagatatgttcgttgcgttccactatattcggaggccacccatagatgagcttgtatgtgccattagctataggcttataccttatagggtcttagcacgctgtatacactgattagacattattaatggttttccactcagtggatggtaatccgcgcattaaaaatgtgccatcagtagaaagatttctgtttgcgttgtttgcacatcatcaccccatcgccgactgctttctccgaagattcaacttcattgtttcctgaatccagacgcatactcatgatgcggccatttactcggtcggcactccggccttatgtttgcccctcctgtcggtctggccgccttgtgggccgtagaagatttgggtccaagcccgatcaagcccccgatgtctacgatgtggtgtgtgtcggaggtggcccagcaggtctagggttactagcagctttgcgtaaggcattctctacttgaactttttccaatccactcaactccgctgcgcaagactaatggttctatataggtgcctcccccttaacctcaaagctcagggtagccctcatcgagacccaggacctccaaaaagctcgcgcctggagcctcgattcacagcacttctcaaacagagtcagcagtttaacgccctcgtccgtgtcgttcctgaagaagatcggtgcctgggaacatcttgacacagaccgagctcaagaataccaggagatgcaagtatgggacggcgaaacagattcccgcataactttcgactggtccgcggatacctccccgttcgagaatctccccacagtcgcgacaatgacggaaaacgccaatctcgtccgcggacttctgtcgcgcatcgcggcatctggagacgagaacatctcaatcttctcgaacacaaccgtctcatctatcgaaaacggtacggaccacccggacggaccggacctatcagcctggcctgttctctccctcgctccaaacggcacagcacagtcgcaactccccactcggatcgccgcaagactactagttggtgcggacggtatcaacagccctgtccgccggttcgccgacatcgcaaccgagggctgggactacaaccgccacggcgtcgttgcgactctttcccttgccgaccctgatcaggtctcatttcctatcggcacgagaaccgcctaccagcgcttcctgccctccctcggcggcccagttgctttgctaccactccccaacaaccacgcaacactagtgtggtccaccacggtagaaaacgccgcctatctcaagtctctttccccgaaagcgttcatcgctatggtcaatgccgcattccgcctttctatgaccgacctcaagtatatgatgcgcatggagcgcccagcaaactctgcatcggactacgaggatttacacgagagcgaactgacttggcgtctgcaacataccccgcaagcctcccaagtcccgcccatggtcaacggcgtgcaggagggcagcgtggcctctttccctctgcgcttccgacatgcatcaacctacatctcaccgcgcgtggctctggtcggcgatgccgcccatgtaatccatccgctcgctggacaaggtctcaaccttggaatgggtgatgtggcgtccctctccaagacgatcgaatacgcagtcgaccatggaatggatatcggtgatattctttctttagagaaatacaccgccgaacggtgggctgtaaacgctaagatcggaggtgtctgtgatatgttgcataagctttacaatgttccgggccatgggccggtcgcatggggtcgcagtttgggtttggagatcattgatcggttaccttttgttaagggattcttgatgaagaatgccgagggttgattgagtggttgaagttgaattgtgccctccccactgcatctttactgcccacttcaagtcgttcgtctccttcccccttgtattacttatatatcaaatatgaccttgtataagatccattatacgacgccaaatctgcaatatgtacattatcacgaatgaaaaactttcgaaagacttctcaagacatgttatttgcatgctacgtatcccaaacaaggagtaaacgtgaaatctaaatcgggtattggcatttccttttcatcttgttgttttgttaatctagttcgtcggggcattgacgttaaggccctcgagttgttgtgttacagcggacgcttgatccctcttcctagcgacacgggcttttacctcggcgggaagactagcgagatccaccagcacaccttccttctcggggtggccgtcctcgagacccatttccttgatgcggactttgccttcagcgagttcgtcctcacccaggatgacggcgaaggggacaccgccttgttcggcggccttgaactgttgtgggagcttgggcttaaccttgtaggaaaattcggcctgtctcaagggttagtctacattctgtttaaaagattcaacaagcgcaatcaagagccaggcttaccttgacaccggcgttccacagagtctggcagacgttcatgcgctcctttagcatgccggtgaagcccttgccgccgaaagccatgacgaaagcgtcgacttcgctgctgcgcagagcctcggcgctcttttcacgctcaaggcgggccttggtgatggagaagatacggtcgacaccgaatgagacaccaacacaggggatctgagccttgggcaagaacatgccaaccaagttgtcgtagcggccaccagcggcaacacttcccactcccagagtggggtcattggatctgtcatcgtcatcggcgttgcccttagacttgctcttctttcctgacttctgcagtttctccgcctcgggagcagaggatgaaacggctggtgcggagccttcggtaacaacttcgtagatgacaccggtgtactgtaaacctattagtaaaagtgcaaccattatagatatagaaatggaactgacataatccaatccacgagcaagactcatgtcgaaagagatacggtcgaggactccgaaagcctccaagtagtccataaggagacccatatcctccagaccagccttagcggaggcattggccaggagagcctcatccttcaacagagtctcaagaaggtcccgtgtacccttcttgacgacatatgtttcaatcttgtccgcgacggcgccgtcaaggcccttctcttcaaccatctccttccggacatcggcccaaggcatcttatccaacttgtccactgcgctagaaatggggcggatcttgtctgccggcacaccacacacctcgaagacaccatccaagatcttccggtggttgatcttgatgctgtaacgaccttgccatccaagctcctcgaacacttcggtgacaatcttcaagacctcggcatcggggaccatagggtcgaaggtaccagcaacatcgaagtcacactgatagaactccctcatgcgacccttgctgacggcgggttgatcccgtcgatacaccttggcgatatgataacgcttcatgctgcgcacgtcggggttcatggcgagccaacgggcaaagggaacggtcaaatcgtagcggagggagcagatctcaccaccctggtcctgcaggtcgtagatgagcttggagtcctcgccatattttccggcgagaatctcgcgcagctcgaagacgggggtgtccagcgccgtgccgccgtgacgcttgaagacatcggcaatggtggtaaagatgcgatcgcggaggagggcatcggacccagaccagtccttggtacccttaggggtcttgaggttgaagttgttcttttccttacccatcgtgtctaccgggcgcgacgaatcgaggttggaggaggaggaagacgaagaagagtggcggtagtgggggatggtggggtcgtgaatactactagtactaataatattcttgagggctgttgggcgaacggccgctgtcgctgtcaaggcccgacgacggagggtgacgactaccgggtcggcaattgctcgtcgtgctgagcgcagaaggccggatgagagagtagacttcatccaagacagttggaatggaaatacttcaagttctaaatccctaaagcatgagtcaactcgattttctggtccgagcctgtgattggatcctttcctgccgtttctgtttttctttgatattccgctggatcgggtatgtttcgccgtctccgttgcccacctccatcgggaagttagggctcagactcagggcaagtcacggcgcataaaggtatctctctctctctctctttctcttaattaatcaattggtaaatacaagttccatacccgggatgatatacatagtagcaagatagttaaatgaagtttactttgcgccttagttgcccacatttcccgctcattatgatgctgccaatagagatctttttacatcacagcaattcaatccatcggtccattcggctgagaatcacataacctgcaatccgttagcatgaaagtcgaaaaaacgattgggaattctgcctacctctgcgattgactgtctttcgatgatggacttctgcttctcgttccgagacacccggtagtagtagtcgctgaagtctccgcactgcatgtagcgtaggaattcctcatcgtgcgtgataacaatgagctgaaaattgctctgcgcctgacgagtgcgaatgatatcatgtagcgactcagccaaggaccggatattatcccggtcaagattcgtcgtcggctcgtcaagcgcgatcagaccgcagttgacaccaaagcactctgcgagagccaagcggatgatgatacttgcgagtaccttttgtcctgcgctgcagcgtccacgcatatccatttccgctccctgcttgaccatacagactcggtagttataggaccggttacccttggcattttcattatcggagcggataaggatagtatcaacgtcagtgcctcggtaggtcttctgccatagctctccgacaatggcattgatctcctccatctttaagccatggtatttcataatggccttatccagggctcctccgtagcgagccaagtcatccaccgcagctttcgtggtctccaccttgatgtgtgcttccttgtatttggacgccgcatctttataatctgtgttccagtctgctagaagctgcatcagttgatcgtctttagatttcatctcgcccatcctgccagcttgctttgcagccagtgcgttatgttcgcgggttcgacgttctgactcgtccttgaaccggctccgatcaacctctgcgttctgggctgctaactgttcgatctcttgtgtgacctcgtcaagcgccctagttgcttgacgatatgtgagattatccgcatattgacgcttggtgttctcgctatccttcagctgggaagatatcttgttgatctctttcgttatattcgcctgttcggcttcgagctggccaatctgcttctcgatattctcgagttcgcgcttactgcgttccagttgagtcggacctccccgctcattatatgcatcaatctcttcgtttgccagctcgagctgatgtacactctccgacatctgagagattgtttgttgcatttctctttcgcgtgcttcggcccgctggctaatatcgtcatacttagcttgaaccttgagaagctcaggagtcaaatcctcaatatccctatcggcttttgcgattgcttctcgttgttggttgttgagatttttgtattcttcaatacgagcgaggaggtcggactttctttctaattgaaatttcgcgttgtcgaggttgctcttcacgtctcttaactgtagttccaggttgttaatctcggtctgtgtttgctctttttcatgtgtgagcttcgacaaactcttcttcaaagccctagacttttcaccaatagctgctatctcttcttgaatatcctcgagcgtgcgtgctgaggtagtatcctgttgtttagaggaaaggtcttgtatctgggaacggatggatttaatttcaccatcatatcggacgatcgtgttgaccgttttggcgagagcttcgacatctcttttcttttcagtcttttcgctgacaattttgtcgcggtcctccaactgattgaggagctcgtcacgctgcaatacgtattgctcctcttccttttccaactccgggatttccgtctgctgaaaacgagaccatgtatcataggaagtgctggctgatcgtgcagcctcaagatcctcttctaagttcttcacatcctcgtcgtcggcatctcttttagccttcttaaccagattttccaatttgtttctgaaggtctgcagctcggcatcactcttgaagcctcgatggcacagcctacacaccttcgactgtttaacagtttccagacaagttgccatatactcgccgatcccagcatactgttcagcatcttttcttgcaatatcaagctgtgcttgtcgttgcttgagaacctcgggaaattcttcgggttcatcgttgatagcttcacgaatctcctcgatgcattcttttagagccttctgtcgttggcctaaaaccttcttggtattcttgagtctgaattccacttgctctagttccctactgacgccatctcgttcgttttcagcgcgggacacctgcttggattcctcttccagcacatgctggaattcctgctccagggtatcaggtttccagtcttgaccgacgaattttgatagacgttcgccgtgggcgcccttcatagtttccaggctgcgctcccgctccttcaactctttctttagatgatccaatcgtgccaagtcaccggcccgtttagtggcatcgatgagttctgagttcaagcgcgaactctcatcttcaaggcctcgaatttccgaattgatgtcgtggatctctttgtcccaagaagcagattttgctcgccccttagcttgatccagatgcgactggatgtcttcgatgttggcctcaagcgccgcttgaacaccttcatccacgtttatttcattaagctttccttgatacgtggttgattccttgtcattcgcggctatctgtcgcttagcagcgttcttggtctcctgcaatgcagacttttgctgtgcaatgtcgttcagagcagtttgtacttcgcgcagctcgccttgtgcctcccgcttgacccggtctagggtctggttctgatctttcagcaacttcctgaccttcctcataaattcatcgacatcattctggtcctgaatgttgtcaaatccccgaatattgttgctacgtgcgatctctttggtcatccttcgtctccgttcaacctgcctctcgaaattggctttatcattctcaaacttgccgtattctgcctgtttaacacctagcttttgccgtgtccgctcaatttgctctttgatctccatgtagttctcctttcgagcctcctcttgctgttcatactgaagctgcttggactcgaactgttccaggtttgactgtaaccattcgtctgaatcatcaagctcgaccaggtgtcttttcagattgtcgatagttgattggatactttttgcctcaatacgctttccttctagagtaccaaggacttgggagtaactttcggactctcgccaggctttatcggctagctcagcgacacgtcgcatctccagagaaagctgttgtgtctcctcacgtaaggtttcgatctcttgttgtagcttgatcgatcgcttttctgctcggtctgctttctccttatcctccttggcgtgttgttccatgatcttgtacttggcaagttcctcgttctgcttcttcctcagagatttgatattgtcaatagcttttgtatacttcatcgcttcgaatatttcgtcgaatttcttcttcaagactgaaggttcactcataggccacaagctctcgtcttggtggcagaaaattacagaatctaagatggctttggagaccccaaggtactgaggcataatctgatccagctccgcaactcttgaagagatagctgtcctttcaccatctttgatcattagcagttggccttctagcgtcttctgctgccgggtggttttcttcacggagagttgtaggcttcgcgtagataccatcttagcacccgacgtgcccttgaatgacagcttcacttgagccaagacttctttctccccacataatttcgggtcatggatgaaggcgccgcccttgctgtttggcggaaggtcgccggtggtggcgtatttgagacattcgataatcgtctaaggcccgattagtggaaatgttactgcttcagttggtctagatattccgtactgtctttcccgaaccattgtaaccgacgattaacgtaagaggggtgtggaactggatggtttcgctacgggtgttgtcgaaggagcgaaccctaaagcaacgcaaacaatgaatcagcgatcggtgacgggaatccttcgggaaatacacttaccccagaattgaaagcttatctatcttcgctagtatgggacagtatattagattcatcgccccgcagtcgatctccgcaccacttacacctgccagtttgtcagtgcaagacgggagacaggaccacaacacccgactcacatcttgagagtgacgcgcaaccgcacgtgtggaaatagacgttgggctagatgtatgaggtctttcggttatccttcaaatgacctcgttcttcctaggtgcccttggtgatattgcacgaccagcgttccggaaaatcaggtcactttggcgttcggcattggtgctgcgcgtcacggacactagagccgacgcggggaagcggcgcgagatcacgtggcggcgatgcgactaaagtcggaaaataaattgaatttaggaagtacttttgacagatgatagccgcccgtcatgtgctcaggtactgtaccctcttacccagtataggaaatggtggctctcgcacatatggccaaaggacttcagttggttggtaccaattgaatcctcctcagtgcctggaccccctgagtgcccagcattggacgagaagttccagtcctgccaaacggtggacaatatctcattggcgcggcgagtgggccctccggcgttgttatacagcaccggaattgacagctctatcgcagccttagtggctcgtgtatcttgcattcccacgggtggccattcctcatgtccgagagaatatttcctctccgcaaaaacatcgttggtttccctggtgccaacgatggattggaccgctgccgaacacgagagtggggtaacgcagaatcaccagcacagaatgcagaccgaggatcatgattcttttgcaggagagattcagaaacttccatcaccgccggccggcaatacgggtgggcagaacccatctgacccggcggatgaacagggttggccgcagcgtgtgttgaatgagatgaaagatatgctactacttctcagctctgacggcaagatcttgtatgcatcgccatcttgcaaatccatcaccggctacgatgcaaaccaactacagcagaacgccttggagcgctttatacacaacgatgataagaccacgtttgccgaggagatgaatgagtgtatcacgacgactcgtccagtgcattgccatttccgatttcgcaagaaagacaacagtagcaatacgtcttgccttttggaagcacatggacatccgcatatgaaaacgtccgaaccgaacgacagtcccgaaaatcacaacgaagattgcattggcgttttccttctgtgccgaccttatcccacgaggggctctcagctactcgactcattcctggagcataaaatcgagaacgtgcgactcaaccagagaatagcacagcttagggaggaagaggaggaagacttagcatcaggacaacagttatatgccggtgactccacgggagattctggtttccgccacaattctcattcaggccgatccaattccaatcaatcatcgttccgcgataccactgggtctggtgaggagaacgagtcatccgacacactcacaaacgatgaccccgactcccggtcgtacctggaaaatgccgcggatgaactgggccagacggaggacatgtctcatattgaaggaatcgagatgttgacgggactacactacggtgatggtgaacgttcccagggactcagtactggtgttcgccagggtcgcctcatccgctatgatatggagtcagccaagctagaccagcaggcccgcgtcatccaggacagcgatcgaaagaaaagacaaaagggtgaatacatgtgtaccgattgcggaacctctgactctcctgagtggagaaaagggcctgagggacccaagactctgtgtaatgcatgcggatgtaagtcagcagtccaatacaccctcttttcctattcgtcggaaatgtcaagctaatagcatatccagtacgctgggccaagaaggaaaagaaacggcaagatcaaatctagccaccaccaccaccactacgtgtactcagcaacacttgtaacattgtactcctcgttcctgcattgcgaaacatattcctgcggcgatacccctgcattttgctccgtcctgctatttcttcttcgtgggcagttaatattttggcattgtccgatggtgacagcagattctttccagcagttgtgctgtgagagaattatgcatggtgcaagttttgaaactcaagagatttatggataaggctcccttccggtctactatctttttttgtattcaatcagattgggattgagcacgactagccagtcaatcgtggcggctgctcttctcgcgataatggtataatgaacaaatgacagtcggaaaaacgacaaaaagaaaatgcccagacataatacgtgagtcttcatgatatcctgttgcaagtgcctcaatgagggttttaacaacacccgattcatgcaaatcgatcgctaaaggggaagtgaaatagaaacataagtggccctcgtatgaccgtgtgggtattagattttttttaagacatttttacaaatttccgagtacattcacaccttcgctgccttcttagggggcggcggaaagtacatctgaggctggttccccggtgccaaggtttccgatgactcttgctgtgctggcggacgagggtttggtgtgctgaaatggtcccggagcggaagatctgacgatccatgtccgaatgtactgaactcagggctccgtgacgacatggtaggcatcatctgcgtagtaccccctgaaggcagcgcggggctcatcatggggaacgttctgggggtcctgagaaccatatcttcgtactccttcatagttctcttttcttcgcggagttcatcgcgctctgccttttcctccttggtcacgaagcaggagtggacgctcacgataatttcgacgaaataaagaacactatgaatacgatgtcagttaccagggtttaaggggaaagaatcattataatgttaggtgccacccacatgataatgatagtaaaaccaaagagcgccttggcttgttgacaatagccgatgttatctttattcgaagcaacactgcatgacttcgtaatataccacggtgggcctgattgtaggtgcttaggatccgacttgtcagaaccagcttgatagctggccgacacgatgtacactatgaacaatcccacgtggacgaatactgacacaggcgggtagaatatccgcaggatatggacaggaagtttggttattaagatgaagatgctcaaaacgccaaggactagattgtagttcgttatgctataatgctgttagtgaattgtcgtatgattgagaactaaacattgtggggcaaaaaatgaatacatacaaagagccccagaccataggaactttatagggtctatggttcgcagcagcatagagaacctcatcgggagaactgttgaagccattatctgctccatcttgccataatttggtccggtatagatcgtgagaagcaatcccagtgaatgtgagaatgacaatagtaatgggaagctcaatggccatcagaatataaaaaaggttgtgtttgcgccagtttcgtgttaagtaaaccatgatggcggttgtatatttgtttccgcgaagacacgagttccagtagttggtagatcagtagaggcatacaacgttcgatagataatttgcgctgtgagctagtgttcttgaacagttacgctgtggccagaccggctggctgggcattcaactcagtcgcatcggacggccaaacacgtagagcacaaagagacaaaagaaagacaactatcagaggaaggcttggaggatcagccgggacgaagccgtaaatatggagtagagcgctcccaggtcgccagggcagacctctatggcccatggcgagggtcagaagaggggcactagcgcctcgagtcagcgacaaaattgcaaagaaactcttgagcaacgcaagttgactgtttctcagagatgcatctggccaatgcttgccgccagggaagcgccaacaccagccggggctcgggtgctcatcaccaataagatagcgaaagtggaagattggctgccggccgtcacacactaggccgtgtgatggagagattgatctgcatggttgagcaacagactggcatcactggttagtttgtgaatttgtccatggtgccgcaggaattcatagtttccctagactgtcctgttagagagcaaagcgctggagtggggaatctaaacattagccagcgtgcttctgtgatttcacctgcataacaaagtcaggcgggagggaagaaactagtatccataaatcgtgcttaattcttgcctcatctgaaaacacaatgttctaacggccatttccgacacattcagaagtaaatgagaaggatgagtggatgaaatgggatatccagataaagtgtttgtattcggatgtattagtaacaaacgtcatggagtgtaaatgtaaatgtcacttgacttccccagtcgacatcaacccacatcgttttctatcacacattttttacagggattgaaaaaagaggagcttaaatgctacataccaatcaaaccaaatgcgctcataagtgggtatatctctctactaggtacatacataccacatgcgacccctccaactcttacgttgccgccaactccataagccaccacccaacctcaacctgttgcataagcgccgtccctcggtgattcggcacgatatgagctccctagccagtaaaaagacgtcggtgcctcataaactgcgcaccgcagcagaaccccggcaaaatatcctgtacaatgtgcggctatcacatatcgaagaggtcaatcctaccgtacgactactacacttggccatccctccgcgggtgcaagctccagaggagccaaatcagagtgacgaagaggtataatatcttcaattaattatttcttcccaatcaattagttctatcctggatttaccaacggtttcccggttgatatttgggtcataccaaattgcggatgttactcaagagccacagttactatacatacagaatgctattggagcatatactaacaccataacagtctgatgaacctcagccatttaccttcgctcctggtcaatggctagatgtgcatatcccgtctatatccgacgccgggggctttagtatcacctcaacaccagcagatgctgaagccctcccctctttacagcccacagcagagtcacttgccgtggaagatgaggaaacaggtctccctcccgtagacccaagaggcagagacccatacgtggaactagctgttcaaaaagcactctccaatcccgccagcgcctggctctggaaacccaaagatgaaatcctgggaaaggagctctgcatccgagtcggaggcagcttcgtctggcctcctccatccgggatagatctcgaaaaggtcaagaacgtagttctcatcgctgggggagtgggtatcaagtaagttccccagtgctactcactgcagcatgggatttacatcggtatactctaatatcagtatgctaaccaaaacagtcccttaatctccatcctttcacatttaaataacaatgccgacgaaaccccagcttcacaccacccttttaatattcactttctctattccactaaactcccagaagcaacaccccaggaggctgccacatctcctgagtccatcttggatcagatcctctttctctctcgcctccgtcaaatcattcattcccagtctcagtctcatcggttacgcataactctcgatctgtttattactagcttacgagatacatcgtctccacttctactaaatcagcccgatgatttgagtattcactcacggagagtaagtcaggatgatctgcgtactgcgcttaccggcccgaatggagatatcaagcctgaggagacggtttgttatatgtgcggtccgcctgccatgactgatgagtttgtcgctgctcttcgaggtctcatgggggacgggagtgatcgtgttttctttgaaaaatggtggtagtatctatcaatagtaaatgctatacgagcacctatgaaatatctgaacaggttcattgaccctgagaaacatatacagcgttgctgataacatggatagcagtgcggatctttatgaataggcaagtagcaaagaaaaaaaaatagcattcttttgatgatatcttctcccattccccacgaatcaaaactccccagccgacaccctccagagccagcatatgttgacgtcctcgcactatacaaagataatataaacaacacaagagtagaatgtaaaagagtggggggacagaataaaacggagggcgtgccggcattgataacaatatgttgtaaagaagggtaaatcactcagtcaaagtaaatgagggacaataattcttttttttaccctttcaaatccagaatgtggaatgcactatgaatgtacatcttttcacgacaatcctctcacggcaccaccgtcgactatcatctgttcatcgatcttagcctctgtttcgccatattcaagtcgcttatatgtcataacccgcccggcattcatgtcaaagtcaaagaacctcacacgccggacataatctttatagcctccatagcctccgaatccaacacctcctccatagcacatccagagcgacggcttctcgtctttgttattgttaagcatgcagtagtcattgacgtggtcactgtaagtccattagtacaaagacgtcagattttggtcaaaacaaggttgaacctactgtccacagctaacaaaaaggataccctcctcttcgagtgcatccttgaagcctgaattaaatcctggagcggttgggggttcgtcccaattcccaatgaacaggttatttggatcacggtattcaggcagtggaatatgaatgaatgccatgttcatgtgcatgtacgtatactcatggtgtttcctcttaaggccttgggcagtgttctggaaccagcggatctggctgggcttgatccagtcataacctcggaattgtcgttcatccggcgaatacgaatgcgaatcaagaagataaagggtcaaagctgagtgtgcactattaccacggccaagaacctcgacgatgtagttaccaacaccgtctatatcctcggggccagccgacgacactgaatacggcagttgctctaatatggccataagctccgaccggttgagattgccctcgtcgtcatgattgccaaaaatagctgcgtaggggatcttacgatccacaagcagcttgacggacttgaaaagcgcactttgtgcatccttagaggtttcgccattcacctgatcaccagtaaggaccaccatatcgggcttctcttcatccaggagcctctccacaaactcaagtgtccgggggtcggcctcacacttctggcccggaacaggttccgctgggatagggtcacggcacaatccaagaccggtactcaaatgtaaatcggccagctgcatgatcttaaagcgaccatgttcattgatcctgggaactggttttttcattttctgaggatctcccctctgaatactgagacgagcttccagttcctccgtccgactatccagcagcagcggcgtatctctgacctcccagccaatccgtggatccaccgcatcggcaccgaaaaggacatcgactaaggtgatcgcagtctgcgaatcactcgcgtggcgcttggctgttcgtctcagccaaatgccacctggtctcggctcccacgtttcttcgtctttctccccatccttagtatcctcagtggtctccggaacaagccgactaatcttcagatcgatcacaactttgtccgtaggaagtagatcctcctcctttttccgctcaaattggacaaaggcggtggacgtccaaccagtgcgcaagtaaagatctttgtcgacttgtgtccatgattgcgaggtaggtttgcatttggagaagggattgatatgcgagcacgtttttatggtcacatccgtaacgacgagtccagaatagtgcgaagggaggtggccatgaatagcggcaggtaggacgcgaaaccggttatctagagttacgacgaaaaccagtatacaaagagcaaatattgcgagttgtacacccgcgcgaacctattagatgacaagttagacacccagaaatcgcacacaagctatagaaaactatatgagggaccatacaaatcggcgtgtcatgttggtagtgaaaacccctggcaagttccaaatcgatgaaaaactgccgagcgctgaagcatgatgaagtacagcaagccgcaaaagaagagttggggctcgccacagagaagacctaacactaggtcatctcaaggggccgtgaaatggaggataaagcaattcagctggacccgaaattcccccgtattttgaaggtcgccgcaaatcccgccaagtctagaaggcggtcacgcccaccgtgactgggccgatcgagccttgtgggtccatgggcctgtcatcagtggccagaagtctattagtatcaggaaattactatgaatcagggtgctcactatgtatcatgtgtttactatttagtatctattgggctctctctctctatcttttatttataaacccaccggcctcgccgttagcactggcagatgtctaactttagtttccctccttctggatggtttcgagtccttcctgggccaccttcttgattgtgaccttgccgctcaggatgtctttagttgtggcgaggattgaggaccagctctcaaagatggtgaagggtgttccttgacgctcgcagtaggtcaccagatctagaaatagtcagctcactggagaggagggaaaaagcaatagagaaaaccccaggaaaaacacgcaccccttcctttcttagcaaacaaaagatcggtctccgaagcagccgacaagtccgagacgccgtctcccgcatacaatagggttgggcgtacgttgtccggcagagcggcatagggcttaatctccagcgatttgtcgtgaccaaaatggctatcatcgtgatacttaatctgccagccgccctcggtgttgatatccttgccatcgcggctttccacatcgttggcgacaataacaaggtggtcatcgggcttatgtcctagcagagtttcgaacagggcgctaatgaccggggtcataccggatgacaatactacaattggcacgttgttttccttggaccagtggtagaattcgacaaagtatggatcgagctgcatgttcttcttaagctgctcgatgcactcattgaagggaaccttgacgctgtctagcatgtcgcggaaggcatcactaacagcagatagggttaatagactgtgtctcgaggagattacctatactgtgatacttaccgaaagctaactttgttctccaagacgtcaaggttcccttgacgacgtttttcttgtccataaccgaggttgtcagtctaggccaaggtcaattagtcaggagtcctgtaactagttctaggaaggcgagtaccaagaagtcattgctatcttgaagtgtaatggttccgtcaaagtccgtgaagaagatgatcttggggttagtcttcatataagggagattggaagcgctcatggtgtcgttgtatgggagtgattagacggagcaaagctgtttaagagaaatgacggtgaaaacagagaacaagtgagtaggtggatataaaaaaaattctaaaaaccaaaaaagtcagaaatgggagtaaagctaaaaggaagcggcattcattgacatcccaccggtgaagaggagaaagaaccccgcgaagtggctatactcgatctgtttagtagttcagccatccatcattcaatagtgtttaaagttgcctgattgaaccaatgtggtgcctgagcggcggttgactattatttagtacggagcaaaccgcactaaaccaatttctgggaattatgcggagtacttacggagtaaaaatgagagaaatttacccgttgatgtactaatattaaatctgatatcacactatctcagtatgggtcccggctttttttttttttttttttttttttttttttttttttttttttaggaaggtcccttcacttttagccgaaccgaagactaattccgagaaacatcagatccaagtcgataagatcttcccacgtcatacagccattgaattcaattgagattgaatggctcgtatgcttcagtcgctgcggcgagccttgggactgacttcgcccaagccagtcactgcgttccgtaggtctatcgatacagacttctccttctttcgaggtatgcttcttctccccggttccgtcgcattgttacgttcatcattaataaccaaatttgaatgattagagggagaccgagccattgtccatggcaaaaccccatcgttaacgaaacccctgcgacagggtcagaaaacagacctccggcgtgggtacctagagcacaacaacatcatcggtcggcgagtgcgcgagcgaattcaggcacagaaaggtcagcataatctcaattgcccaaagggacatgaaaggaaaagtcgaaccttgcctaacatcgcttcccacccgagtacaggccccgaatatcgactcacacttcctacactggacgaatatgtcgccctgacgcctcgcttggtaacaccggtatgaatgcgattcttcgccattgacaactccaccgctacccagatgattaatactgtgccggtagatctacgccgcggacgccaatctcatcgtctccctacttgatatccatgtagcacctccagcagaaggagaagaacgcactcaacagcctctcgaaatcctcgagtccggcaccggccatggttccctaacactgcacctggcgcgcgcaatccaagccgcaaactcaacacccccgccgctaccagctcaatcccagatccaatacctccaaggccgacccatacgaccggacgaggaaccagaagaaaagaacaaagaaagcgcacccactaacgagacaccgattgacccagcccaacaacaatgggacgcctggcgcactcaacgcagagccataatccacaccgtggacgtgtctccaaagttctccgcccacgccgagaaaaccgtccgcggcttccgacggggtctctacgcaggcaacgtcgatttctacgtaggccacgtcgagaactggatagcagagcagaaacgactccgcacgccaactagccttctacccctaacacagaaaacggcggacccgttcctctcatatgcgatcctggatatgccagcctcacaccagcgcattccccacgtggccccgattctgaaagagaacggcgtgctcgctgtcttcatgcccagtatcacccagatcggtgattgcgtgaatctgatccgtcggcagaagttgccattcatcctggagaaggtcgttgagctcggtcccggcatcagtagcggacgtcaatgggacgtccgctttgcggtgaagaagtctcgtgcggatccctcgtcgtggaatgagtcctctgaaccgagcgaaggagctgttcagcaggatcgggagactcttgacgaaggttccgtggagagcgtctctgtccctgaggaagcgcccaaggaagaagatagtgtgcttgtttgccggccgaaggtcggatcacgtatagtgggcggagggtttgttggaatatggagacgcatagaggattcccagaaacagtgaatcgcttttagtttggatacccccatctgtaacaccaaccactactgtactatatcaaagactcatgtatagatcgatagatacatctactaccttttaacaagaactcttctctctgtgcttgactgctagcgatagtccgagtataaaatgagccacggtttaatatatcaagaaaatttacctcgacatcgagcatccatagtacacttatagccatcctctactcacctggacacgctgtgtaagacctcagggctatatgaaaacaagcgaccaaagataagacccccattcgcctaagaaaaaatcatagcaaagcagagaaacgtcttcatgacccaactactccaagccaggtgaccttcagcccctcaacaccaagtatggaagaaaaagccacagatgtgagtagaaattcaacatgagggaaagagtaagatcctagcacatgtaatgagaaagatatgaaactgccgcgccgttgaaagctactttccaagaaaatgatacgcaggttcaattgcacgaacgcactctggcgacagcaatgagaacaaataagactcagaagaatgttaaaagaggaaatgagaaaagcaaaagcagtagacgaacaccacagacacgcgaaaacccccaaagattccgagataacaagataaaccggctacgcaaacaccagtctcgtaagattcagcatgcaccatccctcaattccgttgcggtccaaaatccgcctccacaacctttccctttttccctttaacaacaaactccgcaaataatgcgatatgatcactaggaaaatgaaagttagggaacccgggaactttctgcagatagtccttgtccacctcgccgagtaacgccgaaacatgaagcgtattcgatgtaaaccagatatagtccagaatatccttaaaatcaggtgtatagttcgtgaaactcaactcgccgatcgagttgtatgcggatttcagcttgaacgggtgggtcataccaacccggctcaagtttccataaagtcgcttctcgagatccggatgctcttccgttagccgtccgttcgcaatcagattgtacgccgctgacccaggcgatgagttgaaatctccacacatgaaaagaggaatttgatcgccactgctatactccatggatggagcaggttccggtggagtttgtgcttcaccaccttccgcttctgaaaagcggaacgccgttttgtcggtgcacgcaggccatttcgcgtacgtctcggagagcttcgtgatctcttccatcaaaatagctgtctggatcaacttgacatccttgaaggcagggtcccaatagagatgggcgttcacaacgatgaaccgcgagcccgttagcctgttttcaaggaatacaacaactgcaatgtgatccttttgccataatctgttgtatatgtcatcttggcccttggcatcaggtctccgtaccgctgtttggccaaagttgatcatctgcttgtcaagaagaatgaacttggtccccttgaagaaggtagcacagccatcaacagacttggcttcttcctcctgcatacccatggctcttcctcgaggccaatatacacccttgtagccgttgtaggccaattgttctctgaaataaccgttgtaactaccttgatctacttcttgaagacaaacgatatccgagtcatgagaccttagctcgctaaggatgacatctcttctgaattcccatgacagggcacgagaaggagtatatccgaagtgggactgtgttgcagatgaatcgcacagtgcgttataggaaaggacggtgatcttttcagtggaggtgcccgcagtctcgtcaagaataacccaatctctgtccggaggaggggggttttctaaggtacatttattagcataaatcaaaaggcctccattaggatagttagttgggttcactaacctggcatttcttccctcagatacttaatcagagctctggtaccctccttcataatttgagacttcaaaatatcgttcaatgggttgccttcaattcccaaagtgtccaaccggtagaggtatcccatttcgtaagggagcgtacggatattgttatcgaacaagtaaagcttcttcaggctcgtaagcatgccaatctcctcgggaagctcggtgaggtcattgcccgagaggtccagatgctccagtttccgcagctggccaattgtctgaggcagcgccttgagtttgttgtggtttaggtacagctctttcaggaaatcgtaactgaacaaagacgtggagagtgcccggaggccttgtccgccgaaatcgagggcataccagccctgcctcggggatgcttttactttcgtcagcccattcttcacatcacctccgttctcctggggttcaggctgactgggagcgatttggatgccctttgtctgttgagcgacggcccgggcatagtaatgcggggaactcgcctgccgcgattcagcggccagctgaagctgttgttgccaatgttcattcatagattcatcgatatcttcgtcaacgttagcatgagccccattctgcatgtggctcggggtaaagtgaggagtagcggcagccaacgccccactggagaagttgtgctggtggttaatattgtgggaggcttggttgtggtgtgtatgatgatgagcttgctgtgcagggtgaggatggtgactctgggattgaaacttcggcatctgcatgccgaagcgttggtgagcctggccgccattcatcaggacatgctgcccttggtgtgtctgactgtacatagtgaatggattgagcgcagctgcttggccaaggggaggagatcgtgaaggtgatggtgtgtcgtgactaaatttcagtcttccagtcggagaattcgtcccgttccggacaaggtgtcgttgatgagaaggttgttgttgttgcgtttgaaagaagaactgcccggccccaggctgctggaacctgtaggtaccatctgccatttaccgtggcagatgagaccgtgagttatttgcttgagggggagtttcggagaaagtgagggtcagcgacgctggagacagagcagtggcaggagagagaggagtcggggaccgggttcgttctctccttctcttcaacatggggtcctgaagcggaaccgccccgaatcaaggtgtctggaaatcacgaccgcagcaatttcactacaagattgtctgctgtcaatttcagtcgcaactgaaggtcttgaagcctaacaggtgacgtacggtcgaacgataggggccggcgtcggacgagcgagtcacagcaacaagtgggggaggcggtctagcgagaagtctggagcggagttgaacagcgaccccaaggacaatgaggttgaatagatctgacgaacggcacgtagaaatcggtgaacagatgtaactgaggcgccaaaggcttgtggagatgagttcctcatcgctttgacgctgcgaagtgctttgcatccaaggcgggagtcgctgagatcacgtggcccggcatccgagggcgtgattcgccgccgccgatcagccaagaccgctttcaagacgcccggattttgttttcttctctcgactgtcgctttcagccaaactcaccctggggatcagtaaaggtccactaacctatatagctcctacgaaccagcagactttcttctacgagtccctcttccatggcatctatggttgttctactccgtaatcattcccagaatacatcactgaacaatgacctttgttgtccccgcttccatggaccctactacggaatatgggagtgtttacctcgattatccacttcaaccccaatagttgggtggaacgggcttcatagctagctatcagctgcgtcgacccccaaatgtaccctttctgcccaaccagctctacctttcaagttaatactacaatgcatccctagtcacgcaagattttaaaacaaataagacaaatgtaggtttaaccaactaacacatactagtggggactataatgaagcatggtgttttggtctccgtctccaaacaaaggatggagtcaactgcaaccatattgtgtgacctctcctttcaaaatatgcagccaaatcagcaagactcaacgctgacttggttccaatgcccaatgaaacggtccatcctttgttgatcgtggtggtagttttgagattgggttgtcctttatttcttgaatgacagatatcccaaattccagtctatatttagcgtgcctcatgttcctgcattcatgtcacaagcagatggctgatagtcaacctgcaaatgcggttgagtttgaaatggttccacaatcacctgatgacctatatgggtattctaacgctggaggtatccttagctgtataccaacataacagtaaggaatactgtatactcgggggtaacgattgactaagatcaatctcaagtaggcccaaatatcgaagtatgcctatctatctatctatatatatcgggaaaaggatgcaagtcttgctggctatcatccccaagtgcttcacattgcaacacaaccaccacactaatttcctccttaaatcaagccattatcatctctctagatgtcaataattcctccgcagttactcatgctggagcttcttggtcacacacaatctaccctcttagatgtcaaataagaacaaatttagcagatgtagactatatctgtctccccacccttgtcctgccgcactcaggagagcctagtgctgagttaagaacgatagcttgatgccaagaaatggcagagggttgcaagtattgcagaactcttgtttttcctttggcggcttttagaaagtcaattgaggacaaggccgtgttgaaagttgaacctgcccctcagttccctagtacttctctgtctgaaacaacaacgtgatttagccttgcctcgatacccaatgccaaagtacctagggcctcaggccaccccgtgacccgtgccagcacgtgcatcgcatttgttcccagaccggaccgccacccgagattccccatacggtggaaatccaatgaggagcatccggcgtatggggaatgttgtcatcgattgctcctccgtgtcactttagccgttcttgagcgtcgcaaacactaaccaaatttttgaattttagggctctatattctagaacctctttgcatcagcatggtggaatcattaggtcagaagtacgaacatccttttaaacttgcacgaaaaaagaaaaggaaattgttcgcctattgcttccttctttctatttttgattgacttttctttccctctcttattctaccgaattctccacaactaatcaaagtagctggaattagttagtggccactatcaaagtctgtacctacgttagcttccagacctcaacggtggttgggtgtccagttcaaaaatttcgggttggtgcgatggttccactgcgaccgattttcaaactgattctccgatcatcaattcttgaactctcacgcgcatgaccctgacagatgtactccgtgaactttaagactgatcacagaccaagggggggcttgagagctgaaacgaaagatgagctactaggtcgtaaacaacaagacacccggtgatccatccgtacggcggcggtggcggggtgggtgcccggctttgcaggaaggcattatgcaggatttccgccactagtgggcggagtatcgctcttctccgtctgtaacagttgtatccatggtgtgaggcaagatcaagacaacaaaaaaaaaaaaaaaaaaaagaagagagaccagtcagtcaagaaccggtgtttgcatcggttgaccgccacggaagaaatcataaggcagaagaatgcgagaccgagaccttccgtagcccaatatagagtagtactattaagtaggctccgttcgtagtggagtggacaggccgcttttaggggtcgtgggacgggacttggccgtggtttcctgtcacgatgctctttttttcttgcccccctctcgctctattctcgatctctctctttctctcttccatggatcattctctgcgtcggactgcgtcctgacataattcttttctttctttccctccttggacttcctcttcctcatttctaagcgcccttatattcggttccaacaataattgtacaatgctttgaacactaactgactcctgctgtgcacgagaatgcaaaccatccctggcagatccaccttaacgctcgaccgatgagaacagggattttgttttagaaatggatatgatgtcagtcagcacggcggcgttcgccccagctgcagcttctggctccgacctgcattcgatcctaagctcaaccggtcctaccagagcagcgacgtcgacttcctcgctcaattccttgactgactacacgaactatcctctgatccgtcagggcgaacgcacgtacttgcgcgaccccgaaagtctgtaccctttaccatgcgatctcccggaaattcatcgccaaacgctgcgctctctaatgctgctgcgcgttttcggaggccctttctgcaacccatactttgccgatcgccctccccagcgtgtcctcgaaattgcatgtggttcgggtctctggtctagcttgtctcatgactatttcgcccgtcgtggcgctcgcaatgttgctttccatggtattgacctcgtttccttggcccctgacttgcgcaaaaagggtgtcaattggcaatttaagcgccatgatctacggaagcctcgtttgcctttcccagacgattatttcgacttcgtcttcattaaggatgcgtcgatgtgcccctccagtccagcgcagcaggcgtccggcttgagcgagccgctgcgcgttctcaaaccgggcggcgtcctggaaatatgggattccgattcggtattccgatcattgctccctaatcctgcgcccgctcgtaaattagcatcgagggaactggaaattgcggatgcgaccgcaacctacacattttcgcctgccactccattcacacgagtgcagaacaaattcctccaagactacaactcttgggctgagaaggcattcgaccgtcgcaaactcactgcactaccttgttccacgattggactttccttcaactccgaggtggacgtcttagagaaggtagatagccgccggattgctataccactgggcgacttacggtgggaacgagaaagcaaggattctagcggcggcgcgcggaagcaattaacggcagatcaaatgtccatccggcgcacagctcttttgaccgtgattcagatgatcgagggcatggagcctatcctcatggaggccagcgggaagagtagagatgaatgggataggtggtggacagccatgatggccgatgtgttccagaaagggggccttgcaaacggcgaatgtttggaagtgagtgcttggtggggccaaaagaaaaaccctagcacaaagaactcatagaagcgtctggttttctggatggacgagcaaagaaaaagcacaaaagcagagcagcccgttgctcacttcctattggtgataccccatttatgttgattttccatatgtatccttcgttccagtcagggcgtgatgtcaaattgccttgctggccctagttgttttcatagcgctgtttcaacgtgcgatatcgcttcaagtagtacctagtcgttgtacgttagttgagacggtcaatgtttctcttgataattgcatgatagatgaataatgataattgactgaaaaagagctgaaaccggagttctaaagctaatctattgccgtaaacttggtaggatcgctaaggtcgtagatgtatggcgattgaaagttgtagaaagggctgaagccaaaaaacattgggtatgcaggaaactcacagtgcctcaatctctatagtccagcaggtaagtgtcacactcaagctatcaccctcttttagatggacatacctttcttcacgaaatccgcccgtgctatgcccttccgtatctgctcatcatccgtcagatgtgcctggctggcaaacgccttatggagtctattcctgaagtattcataacccagtggatagttacgcccgagaaagagtaactctatcgctcacaagattagcacaactcagcatgcatggtagattaaatcgggaggctcaaatgaaaatactatacaaacctttatagatattgattacttgccggcgaagttcaggattcgtcattgtcacccacttgagtccgaaggaattgaagtttaagatgcaatgaagaggtgttgtgcaggaggaagatgtgttgaaggatgcgggctgggacttgatgtttgctttactttgcttggccgagactacccgatgacgtcgtagcacggataaccaaagcagcaaacaatgccaaacattatttactgcgggcagactcatccagtactactccgtagtagcccatctttgcttacttgggtcattaccactgacgaagttatctaccaggtcgacataaccctaaactttgctcaatgaaagcttgaagcatgctggggaagtgtgggggttgagttcctgagccgcagtccctgaattaaatttccgtcgcatggaccagtcaggctcacagggccaagctgggggtctcgaatggcatagtaggtacggagtagtaggaaaatatgatgatactatatttttccacagggggaagaaatatccacttctactaccgattttttttttttttcattcttcttcttttttccccttctttttttttatgtttcacaacgacagtataattaaatatgagcgtaaaagcccattacgaccagactgcttgttctcaaaattcaaaagcctcgctttgcacctgcaaccccccatgaaacacctactggttaataattccacaccttttgtgctataacctaaatttcacctacataaaactctcttccattgactcctgaatatctcaagttgttatccgcatatacggcaagccaatcctttaaactggtagtaaaatcgagaattccaaaacctcgtctacggtgaacgggagtatatactgaagtagactagactggttgcgggtctccacacagctgttggcgaagtccgctctatctttggagaaaaggattctggaagcgaaaggaaagataccgttcacaattcagaacagtattataaaacaaaggaaagaaaggggaaggggtacacgcgacagggattcaagagagaagggaacaatgtctcaatgaggcctttgccgccgatatttgacgcttgagtggatgaattaatatatcccgaaggaccagcaccttggctattgatctcgaccgagtcaggattcatttgcccctagaactgcggaacccttgaaccagacctggtcgttcggcggcaaatgtgaaacactgacttctctcgcttagatccatctcaacagctatcacgacgaataccgagaacacgtcatgacaataaggtgatcattgccgtttatgtatgaaaaaccctaaccgttgtccctcatgatatcgctggatcctgactatcactggggacaattgcagcgccatcctaatcgttatccatcaacagcccatgatgaccccaacagctccaagaggagttacccgattgggcaacggggaagtaggttgcatactataaaaatggaatatcccgaagtctaccagtgtggaatgatgtgcaaccgccatcattcattctttctttaacatccagtctttcttttcatcttgtcgctctttcaatatgcgctctatcgttctgtctgccctggcggcgggatttgcacaagcttacacggtgacgaacgttgggttgttcatgttcaaaaacatcgatcccctggtggtcccgggaaaatacaccagccatatgcatagtttctttggctccgatgctatcactgcgaacactaaaacatctgaggagttgcagaagggctgctccacggccaagaaccccaacgattattcgacatactgtaagtatattcggtatcgcatgtgaatgctggagcttatgaatgcaataggggttccaaccctctatcatgtcgatggttcaaattataccgcagtacctatcttcagattcagcgcgtactatgtcgacgtcaacagtgccgagattgcaatcccccaaaacatgaaacttctggcgggcaatgccactgctacgtcccaggacggcgtggatggcaacgctggcattcaatggttctgtgacagccaggcaggagaggagaaggacgacgcagccttcccaacggagacgtgcaagtaccatctgcagactcttctcctcttccccgactgtgccaacccagacactctagagtatgcctactcggccaacccagattgggtggatggctacggcaagaatcgttgcccaattggtatgaagcgtatccctcgtctccggttctctatccgctacgacttgcggaatatcctgccagacggctggtccggtagccctcccttggaactcgcctgcggctcctcatactgcagccacggagacttcatcaacggatggcttccagaggctgcggataacatggtgaaggacgcctcctccaatgaccgcgagtatttccaggtctcgggtcccaatggagcgggtgacgaaggttccttgtgcgatgcggaggatgctcaggatagtgaccctacccacggtaccagcgactactgggagagtgtgatgatgggtatgagcaagaactcgaccgtagtgaggaggagtttgtctcgtcgtcgtcatttttaaaccaggtctaagcctgagaggttcgcccacgttcaaaccagagcagctacccatcacatcttcgaatggaggtcgctggtcgacgtcctgctttactgtcttgcaaacatctccaactattgtcgctcgctttgatgaatgaagatcaagataaagtaacgaaaataataacagtaaatccaggaatttccacactacttttcttttggtctacttattcctctgaggacggtgagagtctggccatcgctccatctgagtaatttagcatatatttcgcatcagattgggttgtgtcaatacaaagctgagaagtgacgtagttttatcatgtaaaatcaatgcaatatactccgtacaaaggtcaacatgaatttagatttggcgttggagaaacgaaaacgtgaaccaagagataccttccgcactgccttatactattggggccgaggacccacccagccttactccactcctcctatagccggagttacagccggagcatctcaaagcatctccaaccactacatatcgatgctcaattgttccataatgaccccaatttacgcattcaggaggcagtgttttactgcacttacttcagaatactcgttcctttctactcgcgccctatcgacatcaggccccgcagcacgaaatgccgattcatcaaaaaccaccgcgccccaaccccacaggatcgatccccgatggcttaccatgacaaagaggagattgggcagatgcatgatgtttggcctgaagccggcacaagtccaagaagccggagaggtactccaacaaattgcgagagattggcgtgagttgatcgctggaagcgaaggttacttaacagatgcgacaaggaggggcctgttccggcagagcgttgcttggggagagatggtagggtgaatataccttatattcggcataatgtactggtactaatgcaagacttttgcatggaccacaggataccatggtaagttgatagagcccatatccgaaactatgcctattcggcacatttagctgactgctcatcaagggtatgtataagtgctctactcgctgaacctcgataatgtcgtctttgtcgcagttcctaggtctaattattctgcataggccatgttaataatgtcacttacgtccgatacgccgaaactggacgggtatacatgactcgcaactttgccacgcatatagatccggctcataagaaagaatggatgaatattgtcggaaataccggaattggaatcattttgaggagcatcaagatcgattacaaattcgtgcgaccctcctcaaccccaagtacgacatcatgtttgctaacagatggggtctcccctgtagcccatgaaataccccgacgaggtcactgtctaccataaagtagcacatgacccatcttcttcacattcacacaaagacgcatttcatctgcaggccgtaattatatcagaagcaaagcaacggccagctgcccgcgtccacgaagacctggtaatatacgattataagcgagggaagaaggccgagatgccaccattcatgctggatcaattcaaatccacctgggagcttcaagagaaagcaaagacattctggcagcagcggatcctcgatattgaagcaagggtgcgaacgttggaaatggagagttgggatcgcgaggacgccgtcgaagatacagggtccgcgaagaaatgaatttctccctgatttgatgtggagatggacacatgtttaattgagcgtccatacagtaccttgcgtatgcttcagcaggatatatgtacgcaacacatggaccctgcgtatgttaggtattgtcactatgtattgtatggtacgtacagagaggccacatgtatccatcggaaacgattaccacgatacaagatccgtaatctatcttcttcaggtggcggtgttctttccgagccaagaaaaagcttgctcaccaagtagcccagtcagtaggcctcggtattctacctcagggctcctgtagcctccctatacggagtatgaccaatctagcgtagaactgggaaaaaaatttttctgtacaaacagcacccccaaaatcatctaccatgcacttagtagtcccctttacgtgctcccaactctaacatcgaaaatactagaatactagcgttcggcccagccccggcccttggctcgggcccaagccgagtaaagacccttttcctcccagggacgcccattgattggccccattggaagaaattttatctaatagcatatagaaacacatgtgtcaattgccggctatgatgcctgaaagcaaattttggtatcgtatgatattagtggtactcgattgggaacaatgggtcaaactttttgcagtgtggatgcgttggagaggggtgcatgctggaaacgtgattctgagccagggttccctggtcctcaaattgtgaaatgatcgacggcctaaagctagttgctagatgaaaagacaaaacaataagttctgccgccggtcaaaacaattgtcggccttggcgttttctaaacgagtatggaatgcggtagtgttttctggtgctctggattattgtattgatgtggctggtggcagtttcattttattactccgtatgtcttggaattatccttttacattgtattacgtgtgcctctatcttgctaatcatgctgtcagagactagttcggggtactcagcttacactacggtttatatatatgtgtgtggtagccacaatggcccccattgctacgttgctaaattgctttcatattgattgcttagtctattgcttgatgcataaattccacaacttgagcaatacatagtcaactaggcaggatgcgtatacctccctccagtaaggatatggggttgttacaaaccccacgatcggtgatatttagcatatccctcgtcttgcaggtcattctttctcacgtcatgtcgtcactacccaggttcctccttgattatagggctaagtaaaccactaaaacatggacgcttaatattacccctacaaataaatctacttgcagcccgtaagacagaccgtttagtcagatacttgtgtttgcttggggccagaaatggaaaactggcccctataagcctaacaataagcatgttgcttcgctaatgcgaagatatcaaatagatagtagctaaggtgctcccttttgtatgttagagactaccctctttacagactgtcagatactagtggttgtggacatgatactatgggttgcgtcccgaatggaggatgactgcatgactgtatacaatagtggatgatagagagatgaaatccaacggataagggcgtaaagaatgctggggctagggtgtattcctgaggttgcagaaatagtcgctgaacctacgtagccctggtatgtagcttgtctttgccgatgctttctcgagcggcaagtctaaatacttaaccttgggctgatggtagatttacctgtcaagaggaactcaactagatgactccctaggaagatatcacatctcttcatttccagatatccaacaccgcaataacacaacaaaatgcgggtcaatgagtactgtaaaaatcagagcggtatgagtaagtatcatctgacggtcgtactagtctttgcggggcgtgattgccccatcgcaccgactattggtggaaacgagaacgagcatccccttccggtatagaacgtcgatcatcctcaaaattccaccctaatccaacgaataatatagataccaagactgccctaagatgcttcacctgacatactgcatgcatgactctccctacgaggcaaaggaaaaaaaattggggaaaggccacacacgactcgggggggaaaattgcgacatgaacagcgcattatcatatccttaagacttgatcacccttacaggagtccccaagagctatgacgctatagatggtggagctttgccaaatccgaacgggttgccgatggtatcgattgtatggtggtgtatgatgttaccgaaggatcctactttaccttttaggctagaaccggaagcataggtattcaattagggcatgaagtattctgcaacccaaaacgagattgactggcattgttcgagagatttaagtatactggatgacgatctcaccagccatccccgctgtgttcactccgatgacgggagcctctcttggcctgatgagatgtggtactgaatgagagagccgttaaataccaatggagatatcaggaatgatcgactagccatttaataaagtttattctgtacttgacctggggaactatgttcaaaaccttgtgacacaggatcacacatgtcgaattcccgtttttgttcagattactgcatatctgcgaaacagcatattttggaatgtgtttgggtagatcgaaagatacccaagagtactttatatctcctattattacttcgagtatgtctttataccctaggattcaaccctagcacataccatcggccaagagtgatccatccgtcttgcctaccgagaccgtaagttagccgagcattccgcatgtgaagtacactgctattgctacccacaaaaaaatcactaccgtagagcgctggaaggaaaaaaaaaaaagaaaaagaaaaagaaaagaaaagatagctattaggtatttgaagatcttgacggctggttgatcggcaaagccgcaagtgtgatttcctgacgccgttggaggcttttattatctagcgttaggctgtccaccgccatcaacagatgatacgatattcaaccccgcaggaggccgcacattaaagaggagatcgtcagattatcctagctaattatgccctcaccctagtctgggtggataaagatgtgatgaattatgaatatgtacgagagatgaggggttaaacaaagcaatcagaaggatcaaggggctctttcgagctatatcattggcgtcaatatgaccgtagcctgtacacgtagcatccggcttacgaggccacccacaattacagtttagaatgagttttgagatcaggaagtccctcggatcgttcccattgttattgaagaataggtacttcttagcaatcgagcgtcgtgccatcggagcctgggaacctcggatgcggttcggtgcttggatgagagaaatcaatgtggtgatttagaaagttttcatccacggctttgagttaacttgcggaccgagctttgttgctatgaatcagcctaagttgatgcagcagaccggggttgatcttcatggccgctggcagttgcagtatcctgtcccgtgtatgtattctagtcacatcactgtatgcacaggatatgaagcgagcgttcactgacaaaaaaaaaaaaaaaaaaaaaaaagaagcccacatgggtattattaccaggatttcttgagaccgatgatggagatagtacttcttattcaatttagaaatacagctgtccaacagggattactgcataggcgacgacgataccacgttcctcgcgaacgttgcttcctttatagataggtacatgaacagcaatcaataaaagatatccgcatggctgtttgatttccatggttggttaagaggttccataaacatctgaaatatagggtagaccaaaaataaaccaaggcaaccaaccagattcgatagttggcgctgtattgtacagtaagaccctctcggatttcgatacatacaagtagtggatacataccttacatactggggctattaggtgtgttttgaagacgggaaggaagattcctgaggcagcgacaggtgttatggtcgccttactgccttattctctttcctgacgatcagttccaacctttcgtttcgtctttttcccgcctcgtctatccagacccaaaagtctaccaaacctcattcatttttccttctctttttactcccccgccacgccttcttaccctctcttctccatattcaatcccaacttctcttttttctttccctttcctttcctttcttaccgcaaccattcctcttctaccgcttttagacccctcccgtcattccttttcctgcacacttcctgcgtcgcctcccctccctctctctcctccccttctttacccgtgtatctgatactgtctcgtctctactccccgcctggtccaagtccttggctaccatctgccaagctgactcggacctgggtgttaggctcccttgtccatgccacgttcatcggctacggctaggaagagtcatagcaatcggcaggagaatggcgccgccggctccggcaagaaagtgaacaagcaaaaatcgaatggacaactgaatgggaatgccaacggtagctccgcaccaatttctggaccctcctctcaagtcgactggccctcgtctcgctccaatagcgatacggcaattaattccacggtagcgacggcaaccaaggccaacggtacgacggagtgctcgaaggcggatggcaacggacgtggttatctgaatggatacgttaagggcaacccggacatgtcttacgggcaggcgaatggggcggttccgcagaatggtggccttaccggccaggcgtcgcgtcgtacagagagttccaagaggtcaggctcgaatacctcaatcaacccactccaactggcatcgactatcctcaaatcctgtccgatgtacgacactatcgccattctgatttttcttcttcagttgccgcctatggtccttacgctggtgcagttcttgttcgcctccctgacgttcatgcccccaggcggtgcgtctgccggctctttgacgtccaatttcgatatctttcagggtccggccggaacaccatctctcggtacgatgattgcaatggatggattcttcctactattctggggtcttttcatgtggacgtgggcgcaaaattttgccctcgacttagcccatgttcaggtcgccataaccctaggcggaggagggtcggggaaaaatgggggggttaataccctctgtgttggtattgttcttgttttgcatcttattcgaagtaaaggtatacaggatttcgttttaggtcaccttctgtccgcgaaagttatcagtcccgatttgctgtcgcaatactctcatcttctgccttccgagtttcggcgcactgaaccgcaatcttctccgagctggatccggagtttacttgcggttcacatcttagcgcaagcaggaaccgcaatggctaggcgttcaatggctaaaaatagggcaccggctcctcctcgaactggaaaacgtgttgataccgaggcatctgctggctcgcagactcaaatcgattctgcgttcgagtcggggaccagtgtatcttcttatatcggcgccgacggacaacttattacgccagcaacgcacaaggatggtagagatcgattgatttcggcgaagaaacgcaggagacaggcaaaccaggttcggaatcgccaaccgttttgggctgcgcttgcaagcacgaaggtgacggttatgcgggagtacgaacattccagggccctatcaaaaactgctcgaggcctcactatgaccgaggaggatcttcagggtgtttctttagatgatggccttgtttggattaccgatgttgatagctcctctattaagtttgcggccggcgatctcgtctcagaggatgctggggtttccggttcttgcgaatctgggcggttgggcgaagacatggagcctttttatgtttgcgtcaacggcgcactctgggcgacagtcacgatttgcaaagttcaggatgtagccaaaggttcaagtgtagtacattggcgtggtgagatatctggcctcgcacccaattgtgcctacacttgctcttttttgcgaagtgacacggaagaagagatctgcgtcatgagtgtgaagacaccgatcgcaaatgacgcagaacaaggtgagatagcctccattggccagggaaacacttaagtaatctaacacttgtctcagtagtttcctcggtatctactccgccgcagccatcctatcgaccatcgtccccaacaaccacgctgaaaaattccatcgtcaacgcggaactgaaactcaatgagaagcgcacacggttgagaaaggccaagaacgatcataaacttgtcgtttcaaagattaggaaagagttggacaattataaccatcgtctccacagtggcacagatgaaaatcggcagaaacagcgctctttgcaattggaacggaacataaagcaaacggaagaagctaccgctgttttggaggtccagttagataatttggagaacattccagaggaggaacttgaagaatggtcggcagagaaagcaaagtacgaacatgaacttgagctctttaattcagccaaggaagatgttgctactgctcgatcggctgctgctcgtgaggtgtcacagctggagtccgatttgacctctacgattcagagacgggaacgtcttcaaggtcgccgtactagggttaatgagcagtatgagcgtatcatctctgctaacgcacagggactcaacgagagagagcgtcgcgccgccgaacagtttgctagagagcaagaccaggccaaagtcgaagcgaatttcaatgaacagtttgccagcattagccagtcggtccaggagtatcagttgcggaccaaccaactttggcaacagtgtgtggctatcgagcaagctctccagcagcagcagcaacaacagatcctcttggactcggccccgctcactcccgagggcaatctacctggtaccaacaccctcagcgaggcacccaccctgtccctaggcgctttgacgacgagcgcgtccagcaaccgatcattgcttggacttagcttcccgcctttgaagtccagccctctgcagcatgcttcgtctcccattggtcccacgtcatcccgcccgactagtccaacgcaggcgccgtcgtacttgcagcactttccggcctcgccgctcatcaacaccgcttcccccttcgaatcggactttattcaccgtgaccggtctttctccaatcgatcgggccacagcagtctatatggttctgatttcttcgattcgggccgtcgcccccccttccagtttgatctgtctgagaaggttgtcgataagagaaggagttccggttccgagagcaatgctcccaacttgggtctgagaccaatctgtagtccgttcccgagggcaggcagccgtgcaagtggaagcggaagtggtggaagtggtagcggcagtggtagtcccagctctgcaactggaaaaggcaattaggctgttaaacacctccagtgtagtcaatatgctgctcgttactccaagttacatgtggtctcctttctgcttgtgttgatcgtccgacatggcgctgaagtcgtcttggttttcctaggccatactatatgtatctagccctgtggcttcaccctggttttacttcgcctgtgatcaataaaatcgtgtatccagtgtagatttccgctcttgtattccgtgcgtacgttgtgttacgtagattattacagtagttcagcgcaattgtgaccgaatattctgccctaagcaggcagtatgtaattatgattgcttatcacggggactttattaagttaggtccagaaactgttatattattctatatacaagaatcgctgaagtcgagctaggctatcgcaaaccgattctgcactcacttgtttcgtgcaaacccgcggacgttcagttgcctcaatactagtaaactgccctttggcaccacaaggttttgatcagcagaccaaaactctagatggcgtgacccccctctagtgatactctttccccctttaaacctctcagtatatgcacctcaccatcttactagttagctgtggctcttccatgcgcaacatcctccccttccagaatcgacagagcgccaccaacgagacggaagcttccagtgaccagagcccgcgtctcaccaatgtggccgctaatgttcctcacatattcaatggcttcttcaattgaataaagtgctactacttctgtacttggatccaggtcatgccaggtagctgccagctctttttgtaatgtgaggtttcgaagcacctctggatcagtgttcttgtcatcgagatctttcaatcgaatcttgtgtcagtctcgagctatcatcacagggcgaaccattagctactaaccaactttatataaatggcctttgtgagtgacatttgtgcagaacaaggcgtattgaaattttgttctgaagtcatcatatacagtacggtgaacgcatttgagaagcgaaatagcgtcccttgctgactgctggttgaaaatgagcacgcgaggaagttccctggaagataatcatgattagaatatgctctccaagtgagacagaggcgactgacttctcttttgaaactcgcccaaaccaggaacaggctactttcaggctgtcttctgtgtgggctccatcgagatgccaatgcagttgaccacttttgattgtctcgcacctccctttccatgtaactgtttcgaggccttcaacgaatggtttgggaagatttccctgttccttattgaaagagactccgagtttttctagggcagtgtaagcgagcgcgatggccaaagaagcgttcttcttctggaaatcttcagctggcttgatgtctacagctagcagctctggagcaatatgaaccgtggcaagctcagctcctttctcgctcgctctttgttcgagaacttccatggcgtctgggacctgctcgaccgtgaaagcagggcactggttcttgaatatcccagctttatgccacgctatcttgtcaacggtatcaccgagacgttttacatgatcaagaccgagggtagtgatcccggtaacagcaggctgtacgatgacgttcgttgaatcattttcacctccaacaccaacctcataaaccgcagcatctaccccttccctcataaagacatggaatgacatcagggtcagaaaccggaaatagcttggtttgagcgctggatcaaggccctctcggagggccgaggattctaaagcatcccagacttcaaagaagtacttcgtaaacttctcctccgagattggctccgaattaatctggattcgctcacgaaccgttacgagatgaggcgaggtataaaggccaactttacgcggcaacccgatcgatctattgtaacactggaggattgaattcacaaaggcacatgtgctacctttgcctttggtgccggcgacatggacgatgttcaagcggtcgaaatcactggtctggtgcggcggcggtctaagtcttttgctaactggaaccgattgaagtatgtacttacctcgtatcccacgcgccttacccactgctgcatctgctctaggagtggaacacctgtcctccgtcccagtcctttcccttccagcaaggccttataaccagactgtgtggaattcaacttctccaccgcgtcctttctgcagtgagcaaaacactataaccccatggggaaaagaaaacgcacatgataactcggcttttcatttcttactatcattgcgggaaatggaactgcaagtagactgtccgaatatgtctgccactgcaaaggcacaggaaaggtagatgtccgtctcatgggggaaaaaaaaaggagtaaggagctaatatagtgtactagatgtatctgacgcaaagctcagcgcttgtgatttcagcccgcagccttttcagctgcagccaccggctaggctgcccaagcgatcagatctacatctcagctgaatcgaagtccccatagatcatccactcttttgggtacccgcgcaccgaaggtcatcggaatttcctttcttcgtgcgatccatcctgccatataccatatatttatttcaatttcaacgtacaacagccatgcataaaggtggcggcatccgcagcactgttttttcgtaccagctctttccgaatggcgcgctctatgtatggtacgctaccaagttctagtgaaaatgttaaacgcagatcgttcctggtgggtgccggcggaatcggttgatttgccgaagatatcggagggcccaaaggctagttcaactaccgaaatagcggtatggatcgagtgaaataggggggcctgcacacacgtcggaatggttctaaagtataggtcggatgcatgttatattggttttgcgttatatttgagctattatagatatgacgtcattaggattatgttgactaaaaaaatttgccgacaccttcttgtactgagtaggtgtgtataaattactgttggtaaatagaatatcggttcggggtgtctgatcgtattatatgccagtggtagcttttaggtataacaaaaccaacgagattggtgatggtctcacttgtatcatgataatatacagaattgatatgaggggaaaatattatatatacagttggtcaaataagcgtcattcctgaaggttctcatataagcccccaaacgtacggagcatagagtctgagcccatctcgaaaccagaacatctgccctcgttcacgcagggagcgtatcgttctgaaagtcagacagagttaactccagccgcgagtctagatctcgtgacccatttcccaaaatcgggtattggcatatgttagacatagatcggtgacggagtgcgcgttaacaatcgcctctggacttgtcaaatgctccgagaggacctttaaaacggtcccaaccacaatagtgtggtcgttaacttcgatctccttcggatgaagttggcattcgaatacgaaaggaatatccgagagggaatccccctccggtgcatccgcggccttcttcctccggagcagagggagcggcctggtgggagccccctcacgggatgtagaggtatgcggtacgaattcgaagtcgcccttcccgcttgcgatggacaggttatggttgcctttggagaaatcccgagcaagggtcgctgtcgtctgaccgggggctagaagatggacgaggaatcgtttggatgactgaagcgcgcttagtgtctcggatggccgtcgcacgttgaaagatatagccggctccgggtttagcgttacggtattgaatgacgaaacggtcattccgcggaaggctttgtcgagaggttcatgggggtctgtggctgtgatgatggcaacggggtagggcactcgtctcatcagcaggcggacttggtctgatagggagagtgtcgtatgtccggtatcgggagtgtcattttctctgctggattgaggccgtggacttggagacgtcgcttcagcgctgctgattgttcggctagagtgccattgctgtgctcggagagggagatatttagtagagccacatgggaatcctaggtcgtaaagagcgattagcaaacagccatcgaaggaagagagtattcaagcccaacctttgatttggcccacaatccggttgacagaaaccgcaggccgtgagtatggaagcttcattccgccgggtgaagagcggataagctcaagggctcaaggcacgacaggtaacaaaacaggagatagaccgacagcgaaaccatgaagtccctccagagtcatcatgaacctccagagaatattattccaaagccgtttcaattgacgagcattcttgcgaaatgcgcgacaagacaactggagggagacaaatgctcagaattccccggaaaagaaaaaggcatcccgttgatgcttacgtaacggcgtccgatccgccaaatttcttgaggacctccgataaactgaatcccgccgaacagccagtccagattgattggagctcgacctgacccctatcctcacggtccgtttcgattcaattcatcttttcctctacttccaaatgacactcagcatcccgcttcgccgcagcgcggtcaccgctgcccgagtccagacctccaccactttcatctgttcgcaatgccgccatgcgactctccttcgacgccctaagcgtccctacaccttcactcagctcatcactctgtcggacggcagcgccttcactcaccgtacaacgtctcccgcccctgtctaccgctccacccgtgacacgcgcaattccctcctgtggaacccatcatcgagcaagttgatgaatgtcgaggaggacgaggccggtcgactagcagcattcagagccaaattcggacggagctgggacgcgaatacccctactgaggccgaagcaagcaagaaggctgagcagccggataaagaggctgaggctgcggcaagggccgctgctgaagaggaagaagataacctgctggacttgatcagttcgtttggtcaggaggaagagcagccatcagggaagaagaagaactgagatacgtcgggactatggagtgtttctgtataatttactcatcgtttatggtctacatcttttgaagctttcatgtacagtacatcataccatttggttgagattccagcattgagagttcgtgcctccaggtagcctctaccttttttgatagtttcagtaacttgtgaggtttgtgtaggtgtgaatcaccaatcattgatcggcctaggattgttcaagaagtgaggcgaggtcatcaagggagagaagtcatttcgaattaattccgagttactggtatcgatacattgctaacgcagtaaattcgactgcaaaattgaaggagactgccataaattcaggaaacaagtcgtgcaccacaccacattgtaagaatgactggcatccgtcggttgaccgatgaacatggcaaatgagtaataaaggggacggcggcctgccttttgtacagggcaataaaaggtcatagaggtgatctgtgagcacttatgcttcttcctcggccgccgcgcttgaggcagcttcagtagtagttccctctgtcgccgactctgcgggagcatccgctgcaggggcatagaaggggttaccttcttcgcccgcgtccagttgcaataggaaggtttcccagagttcgatgagctgtgaaacaaaattatcagtaaccaaagaagcctgtttattaagattgcgtttacatacctccttctgggcttcaacagcgctttccaagaaagtttccacaccggacttaaaatcctctaccttttccttttcaaaacgctgcaactcattccgcatcagccttcccatatcttcgaacaacagcctcgcctgatggaccttgcgttccgcatcggccacatcagcattgacttgatttaggcggtcctgctgtgtctttccttgccggagaagcttctcttgcgtatgcttgcgtttctgcatttccgactcggctgcatgccagctgtggaacgccttctgccgctgagagaaggctgtcttgacacttccaatcagacggagatattcgtcgatggtgatgccgagagtgaggacatcctgctgggcctggcgctcatagagttcctttatgcgcaattgtaggtctgagagcccgacgagaggggatgagagggcgggggatagttcaacagctgcaagcgcatggagggatgccgaaaagtctcccgcagcttctgctagacccttccgttgtgcaactacggtgtcaatggatttcatcagggccttcaactgattctccaaggcgtccaggtaaatctttcggtcatggaaccactaaggtgattgttaacctggcgactccacaacacctaatcaagacggacttacatcatcatgctcaacaaatttggaccctccacccacgttgataccaaaggagctaaacatacccttgctctgacccagatccggctccctattctccttgtttttgatgtctaaattaaaagtttcgctttcgaggaaaattttcaggtctccatcatgctgaaggatagggtgcgcggcaattttgttgagcatgcgctccagtgcggcccttctggattcaacgaaattagtatcgaaacggccaactgcctgcttctctggcggaggagggacgacaacgccagggttgttgttatgcattgaattgtaaagccaaagaaagtcacggtatcggcggctgacggcaaactcaggctggcgataggctttagaagttgtctgaatccagcgtcagcatatcaaagcagtccaagctcgtaagcacagacggtctaccttagttcggacctgataaacaatatgactactcgttagatctcccaccttgtgtgggtcaccgacggtgatctcaaaagtcggtttcgctgccttctcaatactaatactaggctctgattgtcttttcgagctgtccgcgtcgcttggtggttgtacagggggagggttccgaaagcccgcaccgtcttcttcaaggttcacagaatcgaccataccagcaccactagacgtctgagacgcagatgatgtgggccgaacattgcgcccagcaaatgcttccttctggggcggtacaggtgcttgctcgaccgctgcaggactagtttcgtcggctttgtccccgagcgggcctagtggatccagggtatcgtccactgcttccaattttgtcgcatgtgcacttatcttgcggatacctcgcggaccgcgccgtacgggagaacgaggaccggtcgaagtggtttgttgtgacgattgctcccgggctgcgggatgatgcggttaggaggtgggctgctacagggatctgagttctggaaggaacgcactagcatcttcggtttctggtcttgacgtaccgtgattgccggtagactgcgagggaacgtctgtacttcgggttagatatgttgaatatgatgcgcttgtattgttcgtgattgcctgcttaccgccccacggggagtcacctgcgtccagatccatgagggaatgatcggatggattgcaatcggtggggaagaccgaagagcgtgaatattaattggaaatcgacaagaaatcgtcggtgggcggaaactagggaactcgaggtggtgtcgtgagaggaaggcagttgatgttgatggagtcggagaagcgactagtaagtttaatttgttggacagatgatccgcgccgtcaagactgagaaaaggccaacttcgtcacccgccggattagggctgccttctcccccgctctgtcaatgcctgaatccacctttttagctccatacggtatacacatcaatttagaattcatagttggtatggatatacgattcaatgcctcaaaaggggatgcagtcgtgttaggtaatcagctatgttagtagttaacgggagctactactagttggaatatagttaactgtggttttctcatacatactactaatgtaccttgtctcatatattccccctacttcctcgacagagataagctgcagcataacccaggctccattatatatcccagtataggcttaaatctcataacgctctttcaatgcatatagtttctgtacccaacttatcatatcatcgtcataattttgtatcctcaggatatagcctctcaacctagtcgactcggacacgactcccccaaggtcctcaacaatggatatcaagcctcttgcatgtataactcatctattccttaacccatgggatacccagcttgtgcatctccacagcaagctggaacagataatccaagctttcacactgggtcttggccttggcaacattatctccccagacgtaactacactacatgttagattcgcacaaccgccaaaagagggactgattatcactcacattccgtgtcttctcacaagaacggcgcaggtgtcggggttctcctccatggccttctccaagcttccggtgagatcctcctcgaaggcggtgttctcaatgattgggattctcagagtatcgaagaagcctagcatgcccttacccttgccgcgagggatacccttgatctgttcaatgttgctgatctcaaagtagcctccggggcccttctctcgctccactagaagcgtcaccaagacggcccattgggagtgagtatggatacagcagccagcaccacgctcaaaagccgccaggaacaaaggagtgcaagccgatggcttcaagtcgagtggcttgcggatatatttgcgctcggaggggggatatttgggggtggggaactggagaacgaagatgttctccggcttcattaattccttctgcacaccagaaggcgcaatgaagatgtggtcatcgcgtcggatggaagtctacactggattagtttttattgactatttcaatgggcgatacgatcgaccacttacaccaccaccagtaccagtgacccatccccagttatagaatttgcgacagagttcaggaatcaagttggaggggtgctctgggtcggtagattggaccaaatggtcattgttattgttctcgacttgcttagccatgacgtgcctactggtcaagtggggttcagaggacgggatggatagattggagacgcgagagacagacaaagaaggagaaatgaacaaagggccctttcctcaggtaagagtggtaagataattgccgttgacacctaaaccagtgtggtctgaagttttgcaaagtgagtgaggaggggaaaagaacgtcggcggggagaggggcaacgtgaagaactccattttttttttttctggatatggataattaactagtagcgggaagtagatcgcgcaatcggtatttgcaaggatagtatgcaattacttcgaagattaagaaaggaacaagaggaaaaatagaaaagaatttatttatattcatttgaaatttacattgactggattgaattgtcttatttgaattgggtgactagcatgtttgggagaagtgtactaatatgaatgaatggtatggagtactacaaataacatacagggacgctaagaccgtgacaaccaaagagagaaaacaaaaaaagcaataaaacggttctttagaatcaatggacactggacagaacattggagaatctgccactaatcctgtttgggtcggtggaactttaccccaaggggcaagcggcagcggaagaggccagattgaacttaagctaccttcccagcttcatataatcaacctccccaacactcgtcttctctttctcctctcctctctcttcttccttctgtcgtgcggttagcttgtggtacgctctcaccttgacactcttttccccctcgaacctctacggaggaccaattgcttgatcgtttgcttatttgtttctttctttcctaaagctactaccgagtcgggcttcttagtttgagagcccgttatcattcatcatgcgtttcaacgcagctgttgcctccgctctggtttcttcggccactctcatgggctatgctcatgctgaggaggcggagaagaaccccgacgctacctctgtcgtagagaagccaactttcaccgtaagttattccccccggtgtttgtgcgccccgtctctgcgcggcttgctgacaacgcctagcctaccaccctcaaagctcctttcctcgagcaattcaccgatgattgggaatctcggtggacgccatcccatgcgaagaaggatgactcccaaacggaagaggactgggcctacgtcggtgaatggtccgttgaggaacccactgtcttcaagggtatcgacggagacaagggtctcgttgtaaagaaccctgccgcccaccatgctatctcggcgaaattccctaagaagattgataacaagggcaagaccctggttgttcagtatgaggtcaagccgcagagtaagctttgtctccacacagctgttaaacgttcagtgtctaatatacatcttggtagactccctcgtttgcggtggcgcctacctcaagctcctccaggagaacaagaagctccacgccgaggagttctctaacgccaccccttatgttatcatgttcggccccgacaagtgcggtgctaccaacaaggtatgttctaggaaatacttatacgtcacctctctccgagctacgactcatatattatcaggtccatttcatcttccgccacaagaaccccaagactggcgagtacgaggagaagcacctcaaggctcctcctgctgctcgcaccaacaaggtcacttccttgtacaccttgattgtccgtcccgaccagtctttccagatcctcattgatggcgaggctgtcaagaacggcaccttgcttgaggacttcaaccctcctgtcaaccccgagaaggagatcgatgaccccaaggataagaagcccgacgattgggttgacgatgtcaagattcctgaccctgaggccaccaagcccgaggactgggatgaggaagccccctacgagattgttgacgaggaagccaccaagcccgaggattggcttgaggaggagcccaccagcatccccgaccccgaggccgagaagcctgaggactgggacgatgaggaggatggcgattggattccccccactgttcccaaccctaagtgtaatgacgtctctggctgtggcccctggagcgctccgatgaagaagaaccctgcctacaagggcaagtggactgctcctatgatcgacaaccccgcctacaagggcccctgggctccccgcaagatcgccaacccggcttactttgaagataagaccccctccaactttgagcctatgggcgctgtaagtacctcccttttaggatgatttgtgtctcgtataattaacattccctagattggctttgaaatctggactatgcagaacgacatcctgttcgacaacatctacattggccactcccccgaggatgctgagcagctccgcaaggagactttcgatgtcaagcaccccgttgaggttgccgaggaggaggcctccaagcccaagaaggaggagactgcccctgccaccagtgttagcttccaggaagaccccatcactttcgtccgtgagaaggtcgaccactttgttggacttgccaagcaggaccccgtgaacgccgttaagcaagctcctgaggtcgccggtactttgggagcccttgttctctcgatggttctcatcatcgtgggcgccatcaaggccagcagccccgcccctgcccctgtcaagaagggcaaggagaccgcaggcgctgccaaggagaaggtcagcgaggctgtgagcagctctgcggacacgggcaagggcggcgccagcaagcgtaccacccgttcttctgcccagtaaaattgtgccatgatacccgagggagagtgaggatgagtgtaggaagaagcaattaaagttaaacccagacattttcaattttgatatcatacccgacgtgtattgcacgttcagccaacagtctcctgtgataaacgttgaggcaatcataccacttctgatgagatatgagaagcatgcagatagggaactgtttctgctgaagcttgtaaagtagccttgctctttagcttgaaaaccgttacggctaacccccagaatatttgccgtattattgtcttctgaaaatatgaactcttagccttttcgcctcatcgtatacaagtgcttatgaacaattaagctaaaaggtttcgtagaaagataataatatgaagctgaggaccagcccttgattctttgttctcgaaatagcaaccgccagccttttacccatgttacaaagagatgctgtgtccaacaacgtccctagctgtcctatgctaacataagaacacatagaacactaaacacaccattgaccatgggaaagaagaagagagtacgaatcacaaacgaaaaggggtaaaaaggataatagataatgactccatgatcttcaagcccaaaacaaatcaagctcttcatctccagacaacggctggctaacgattgggtttgtgagctgggcgaaaatttgtgcagcggattcaaggtaagctgaacagatactcgagcgatactgcacatagcaatgccgacggactgacttttgcacaactagaagcgctacggaatgatatgattggtatacaaatatacggcaatcgcagaacgcaatgatcaacaccatgtatcatcattatatgccgaagagatgtattggtcattcatgcaggataagagatcattctatgttttcttccctcagtccgcttcttcccttcatcttgtggcgatgtccaaatgaatcgataggattgggtcttgaattctgaatctggaaaacagacgacgttgtcgaatgggtctcgggcgagcaaacagtatggcgttcatactccgcggggaaatccctactagtacgattaacttcctttgtctggttgcattgaattcggcaagtagctcctggttggaggtcatgattggtccgaagcgccgaacagcgttatcggttgccctcggcgatcgtatcaggaaatccgttgaatcgattctccaatacggggaacttagtaccgaactgcatttctgagtttcctgttccagattcggtccaatataccgccgctttttgcttttcgagcaggcccggccgtgttcagtgctaggaaatgcgtgtcctaaccattcatgaacaaataagcttatacaccactgacagccataacaaaagtcgttgatgcagggcttcttggggagggtagatttgatttgaagaattggctactgaagaagaaaatgtttgaaattctcagtgaggagcattaggactctgattgaactatgctacccagggtcgtcttgacaaatcctatagatctcgagagctttcgcatgtatgcaatttagagaccaaacagctgtcatgtggactgtcatatggccctcggcgagtaatccgaagttgtgctcagtgcgtgttcagagagtgacccgacgtgcccaggagctctcacgtgcaacccccacaaaagcagcggcacctgtatggggcagtcggatggggaggaatatactactagtagtatcattcctctcctccttgctagctgattactatttatgacctcttccccccctcagtagtctattctttcacgcttcatcttacccattaatagttcctccttttctttattctctacctatataacctcttttgatatctctgtcactatggccgcccgccggtcccttgcccgttctctccccacactccgcgctgcgtctccccgcacgagtcttgccaacgcatcgtctgccaggtcagcaacatcacgttctctaatgactgcctcgatgtcttcttcttcagctcttgctcgtcgagcttcttctgtaacttcttcctctcctgcttccaacgttgctgcgcgcagactgcacgccaccgcccgccaaatgacccccgcaaccacttccgcggctacaaccgctaccgagtacccgacggaccacaagccgattgctaacccaattgatacggccaactttctggacaatgaatttgttgcctctaaggctacaacttggattgacctccatgaccccgccaccaacaatctcgtcactagagtcccccaaagtacagatgaggagttgcgggccgcagtcgagtccgctgagaaggcattcccagcatggcgggcaatgagcgtgattgctaggcagcagatcatgttcaagttcgtcagtctgatccgcgccaactgggaccgtctcgctgcgtctatcactctcgaacagggcaagacttttgccgatgccaggggtgatgttctccgtggcttgcaggttgccgagaccgcctgtggcatcactacgcagcttacaggagaagtgctggaagttgctaaggatatggagactagaagctacagggagcccctgggtgttgtcgcggctatttgccccttcagtaagcacccccttgcatcatggaggatccaccgctcttctccgaggctaaccgctccccgcagacttccccgcaatgattcctctttggtgtattcccattgctaccatcacgggtaactgtctgatcctcaagccatcggagcgcgaccctggcgctgccatgatcttggcggagctggctaaggaagctggcttccccgctggtgtcgtcaacatcgtccatggttccgccaagaccgtcgacttcatcattgatgagcctgccattaaggcaatcagctttgtcggtagcaaccgtgctggtgagtacatctacactcgcggttccgccaatggcaagcgtgtccaggccaatctgggagccaagaaccatgctgctgtccttcccgactgcaacaagaaccacaccttgaatgctatcgtgggagcagcttttggcgctgctggccagcgctgcatggctttgagcactgtggttatggttggtgagaccgaggaatggctccctgagatcgctgagcgtgccaaggcattgaatgtcaatggcggatttgaagagggtgccgatcttggccctgttatcagcccggagagcaagaagcgcattgaagatttgattgctagtgccgagaaggagggcgcaaagatccttttggacggaaggggctacaagcctgagaagtaccccaacggcaactttgtaagagaaccatttctcctccatctcatgactgatgatgccattgctgacatgccgtgcttttcaaaggtcggtcccactatcatcacgaacgtcacccctgagatgacctgttacaaggaagagatcttcggtcctgttctggtctgccttagcgtccctactcttgaggatgccatcgacctcatcaacaagaatgaatacggcaacggagctgccatcttcacctgttccggttctactgcgtcacgtttccagaaggacattgaggccggacaagttggcatcaatgtccccatcccggtccctctccccatgttttccttcactggaaacaagaagagtattgccggtggtggagctaacacattctacggcaagcctggcttgcaattctacactcagcagaagaccgtgacgagcttgtggcggagtgaggatgctgtcagcaccaaggcgcatgttgtgatgcccactcatcactaaattgaccgtgaagtattaaaataatgaagtctatcgagtttcagggtttcttttgatatgtgttcttttttttaaggaaattgtcattgtccttctattctcatttcggcgatgaagatactataaatataccctaaggaatgcgggtacttggtctgcaactacaggcgagtactcccaccagtgcctgccttgcgggatactaggcaaaatgtcaatgccattactttgtacccactgtgacttatatactacagtagtgaaccagttaagtatgtgttgttatgactgtctattccctttgacaggtatagctgtggctgctgttcatgtgggtctggattgaacccaagtctccgagtcaagtccgatctattttagacaagtgaaggctaataataagaaaattcattcaacgctaatgcaaatgacacctactattcccggcgcttgatgaaggtgtacacaaaacgggccttttcatatttgccgtccttggcaacgacgacacggcgagtgtagtagcgctttccatcgatcacttcgaagccccagatctaaagagtcaaggttagtatctgcagtgatctcgcgccaatgcgaaggtttacatagcaggggatacgcacttgttcagcagtccagccgccggtgctgtccaggttctgcacaaagctctggaggaagagactctcgccctcaccatactcttcaccgacgttgtcagcaacgaagccctcagtatcctttccatcagccagaatctcgcccttcaggaacttcttcacatcctcgtcatcggtcttggtagcgatttccacgttagggcggaattttccatcgtcgcccttcgagccccggatcaagcgggattgacctctgaccttcccgaagacgtggtcatcgtgctcccgtccttcccagtcggtaatacggtgttcggttgtgccggggatacctccggtgactgtttggtcgatgttgacgtgcaggaccttggggtccttttcgtccgcgtattggtggacgctgagggtgacggttgcaatgttgagagccttacgcttcatccagcccattccttgctattcgcgacgatgtcagcagtttgttttcgtcaaggctagatatgcctttgtttgtgactaacttaccagggccagaatgggctcagtggggttggagagggatttgtcctaagaacgcacaagagtcagagcctgtcacagggaaatcttccttgaattgggagtgtttagaataatattagcatggtttctacataccatcgtccactctccactgaggtccttgatggtgatgtctgcgggggcagccatggtgatgcggggtaggttagataagagatatgagtatacaagtcaagaaataaaaaatggatggaggttagccacagttagtgctgaggaggaggatgcgagtaataataatctgagggaaccactggggtagtgagaggttatgaggggatggtatttaaatgaattgatgtcagggaaagagcaagtcacattcatgtgcctttccggggagttccagtcacgtcctccacaaactaccggattaggcatgacctgcccagaatgtcaacctccgaggctgttaccacgtgcatgtgttcacctttttcttctgcttctactactactttaatatcatatctcgacgccatggcgttcaccccccttactggttgtcctatgatggtcaaggaaactgcttggcgccaaatgccaaaccaacgttgaaacaaagatgcctgtttcagcacggaacatcctatagaatcgttggtatatctgcatctttcattggaatgcgacacgattacactatcatgtgaacctggagatgtcaccctagccattacgtatttgtgcatttatatggaagactgtgtttcttgttaatcaaatggtgcaatgcctcaggcccaaaagggcaactgcccctttcacgtgccaacgcggagacccaccgccattcgccctgttcccatagtttacacttagttcacaaggagttccttccgagatgctccaactaaacactctgcaccccgtcagtgcatcggcggatcatggctttcaataagaaatatgcggggcttccggatctggtaaattatttctttctcatgcgggtaccgccatacttgcaatatctatcgtgctactaacccatggttttgagcgtaggacctcgcgcccgatatctacgagacccccgatctgaccgatgaagcgtccactgtaccggttagccaccacatctgaactactgacatatggagttgtcttctaactatgtaattttatttatcgcaattagactgcaacagtccgcaccaattccaacgcagacgatgatgctggctccaaccccgatattgaccgccaaggcatcaatgcggatgaggcgcgcgctcacttcctcggggctaccgttgatgcgcgcgaggtcaatttctccgacagtatcgctacgaaacggaaagcatataggagcaagagtcgcagacgccgaagagatgagaatggcttggaagaagtaggggacttcagcgacagcgaagatgagggtttggacagaagacttgctcgtcttcgcagagaagtggaggaattgaaggatgagatggcttcccgccaaactggatcagagtccaatgaaccccaggcagagcacaaggaaggactggacgacggaatgctcgaattaagtcgggcgttggataatctctatgcctcctcccggagcgcatccgggccgcactcggcagccgcgatactatccaaaaagatctctgaaacttcccctgatgaccctgacaagccggatggaccgactgagaaggtggagaagaagacgactcccccaagtgctccatcttctggtgttctggcgcacgctgcggcctttgacggccggctggcgctcgttgaggctgcgatgggcatctccagctcctcgaaccccttcatcgccgatgggagctcggatgtaccactccagcccgtcctaccggctctagaccacctcacgtcccgtctgactactctaatgaacattcttgtcggcccggctcctgtctcggcggtcccaacaataggttccgctccaccttcaacaaccgtgtcgacacctcatctcgagaatctgtcgacccgcgtgagaaagctaaccgccgacaccgaagctctcgcatccgcacgcaagcgcgccgtcgatgccgctaaggctgcgcaaaatgctcgcatcgctaccgcagctctcgaaccctccgacatgtccgtgtcctcctcatccgccacagaagtcgaccccgcagcgacccaacgtgatgagcaagccacgaaggtccaagctctctacgccaccttaccaaccattcaatccctccaccccattctccccagcgtcctggaacgacttcgctccctccgcgccatccacgcaggcgccgctcaagcctctgaatcccttgacgagctggaacgacgccaagccgacatggcgcgggagatcgaccaatggcgcgaggggctgcatgttgttgaagaaaagatgaaccagggagaggcggctttgaagagcaatatcgcgcttgttgagccctgggtgcgtgatttggaggctagattggatcgattggaaagtaaggaggcatgattgactgggactttgttggaatgatggaaatacccaagttttgctttaagattcttctaatgttcatatatgcatataaagctggcggatgcttgctgtacactgttgcctcgttctagacgtaatgcatcagtaatgaacggttctcaaagaactcggcccatacataacctatgataaacgctttctgcgcagatacccgcgcgagctccgagatctctaaacaataagatacgagatggaatatatactgaaacaaatccaccccaatcgatataagtacagtaaaaggaacacaaaaaaaaacctaaacagaaacgcgtcccaaaatcttaatctttggatccatcctcacctcaacccaccaaccccgagtaacagcccgacgagcaaactcccgaccagttctccaaagccgagccccatcttccccaacaaacttcgtcagaacccgctcctcaactggacccacagcctcttcaccaggccgaacgatcctcagacccgcgaatccctcaacgacatccacgtcttcccaacgatcaggtcccgagagagatcggaccttcacttcttcttcccccggttcgatgaggaggtagtcgaattggctccagaaagaagatgtggacttgagggtttcgttctcggttttgtcgtatgtccaagttggggttgaattttctagtggactaggcatttcgaggaaccgggtgacgcctgtttgacacgcgaggtttcccagatggacggagatggtgggtttagtgctgtgggcgtggttatggagggaattgagggcgtgtgcacctgggtagtttgcggaggaagcggggaggaggatgaaagttgagcagagtagtgaggcgagggtggacaggatcatggccagggagagaagacggtagaggagggatttggtccggtgtgtccagatgtaggatgcccctagggcggaggcggcggttagtggggggatggtgtagatgatgaatcgccattctttgtggggttggaggctgtagatggctatgaaggtaagtgaggggatgagcaggtatgctgctgcggatcgggttgatggctggaataaggcgaatggaagcccgactagatagactagggggtttaggaggaggcgagggatggcgttcgtgaagtagaagtgccatggatgtgtgccccaggcggatgattgaccgtggatgacgttgaatatgaatgcttctagctctggccagagcgggtacttctgccagaagaatgaatccacaagtacggtagtccctaagccgaggagtagacctagtagcccggctggaattatctcacgttggatgccgatacgtcctgtgagaaaaagaaagatggtgtttgtagcaaggaagatagccagttccgaacggaagataataccggctatggtcagcagacatagggataaccgacaccggtttctatacgtcttggaggttgctgattgggaatggtcctggagaaggcatcgcagcgctagggtagatagcccgaatgcgaacatgttggacagtgtccgcgatgcatagtaaagaacatggaattggcttgcctggtagagcaggtaccagatcgctgtagtctttccgaacgctcgtcgcagtccggatgcaaaggagagcaaagacagagcattgaacaggcccagaatggctcgtgctgagtttacatcgttagttagagcgctacaaagcggctatacgaaggcttttataccgagtagttgccgatcaatcgtgtcattcaaccagatgaatggctgcgagaatgcagacaggacggcagctccgacaaatgtccggggcacagcaccggggaaggtgaaatgatcatatttggcgcgtagagtctcggcaacattttgagttgggatgccatatgagagaatgtcatgaacggcttggacatggaaagactcctctaccttggtgtagggagcttgataaaggtggaggagtatgagcgctggaatagcgccaagaaggagtatgaaggctgagcagagcagtagatattagcaactatatcgttgaagctcaaaaaaccaatcataccagcatcagctttccccattgtgccgcagttggagttgtggtttgaagcacacgtagaccaatccaatcaagcaggtggcagaaaaccggggacaacttttccggagttacgtccagtgtggtggcaagtcaatcacaaagtagattcaataattatatatattaaaatactcacataattttttttttttctaagtatcaaaaaggccttatttggtcgagttactgctactatatcatacaaagcgagctcaagcactactgaggatgatgactaatcattgtttctacatagtcaagagtaatgtgtgtacaccagccacggttatatatagttcaaagaatatgcggtagagagaatactatgccgcctgacttttaaatatcctcttgaggagcgcatttccatgaacataagattgacctatacccagttccgaaagttttcaaacaacatgtcgctttacccccgagccctggagatagactgtgagtatcgacgccaaataaggagatttctttggagctcttgaatgacagacaaggcaagttataaagaaaagaaccttgtggtgcttggcgtttatattaccggtatgacgagtggtttgataacttggacgagacgagcgtttattaaccagacatttccagattgatcggtaccaactaggtgctgttgtcttgattatcttggtagcttggttggaatcaatatcctcaattgtaccctggagatcgaattgattaaaatattgctttcctccagcatagtcagttcctctgtaagaatagctggatcgtagagatcattttgtaagtgccagcctgtctattgtttttcggaaatacgcctgacgtttctctcttgtacaatattttgactgtcaaagctggactgctgagtttgtctatgcacgtaaaaatccctctgcactctatccaatatgctccaaagcgtcagccatataatgtagcttctcccgggtacggaattttggataatctgctgtttcttcggctgttccttcatccatctcctcgtcttgatcaatatctagatcatcctgatcgagaccatctaacaactccggcgcgggagaggatagagggaagtctatcgaggacgcgccccctagtggtgaaggtaatgactcctgaaggctgtagagtacattccgcaggggtagaagtactagaagtatccatggagcacgcaattgaaaggtctcgatttctagtgttataaaatatcaaggagaaaaaagtatactgttagaaagaggaagagtcttggctcgagtcccgtgtccgcggagtgggcatttatcgttatcgacggaccaagacacctcaccttctccaaacccactccgcaatttaacacacccaacaccgcaatccaaaatgttcctcttcggcctcggacgccttgtctacgtcgccgtcctaataacaaatgcaatcgcaatcctaagcgaagaccgctttctcgccagaagtacgtcgagtcgatgacctatcccccctcacaagcaaaagcgaacacccagctaatctaataacctctacacagtcggatggggtcgcagccaagctgaccctgccttcggcacctcatacgatagtaccagcgtcaaggctaaaacggtagatctgattgctagtgtgcggactgttatgcgaagtatgttgttgatgtcttacctttctatctacctgtgctggttgcctgggtggtctctgtttgagattatgagcccgggagcatgtctgtatacatgttttggattgagtgctaatgacttgtctctgcgccagtaccccttatcgtcattaatactataatcattgtatattcgattattctcggttgagcgaccggttactttgttttgaaacctgcggagttttttgattgatcctattgccgagcgatcgaccggacaccctgtgagctagctagatggaatgcaatgcttgccacaacacccggtatctcgaacccatccaaataaccagtgaacgttttgcttcctgagagaaacgatgcacgagcgcacgagtgtcgatctgagaatctcatgtaaaaaagcatacatcggcctttggtagctgggtgatggagcaaattgcggcgaactgcagtcgagaatggagctgtttctgttcctgattgtctggatgggacatttgtggcctgggagtggcgttgtcgcgttgcaatgtgactatatgagtaaatggttgtttctatagagtttctctttcttgttctgtggtttagcgtgaaaatatggattccttgaaaaagcttcaaatgatatactacatatgtatacctggattcaagtggttagatggttcgatcggctctttgaaggagaatattccgccgttgcatttagattcacgcatcgtgctggtttcatacaaccttgtctatttgtgtggacatcccctagagtaatagaacacgatatacatggcgaaaggatggacatgtcgcccatcctacctacagtacagtaaaatgctctgctgttcttttctttttcagaatttgcgcaccgttcccaaaacctgaacagacctgaaccccttgccataaattgccagctcatttgaaaagcaatgtgaaacagaaatgaacacgccaaacgcctcatttgcccagctatgtgacccaggcacgggtatcacaaagttgatgaatcgaagatatagagtggtggctaaaataacaagcaaatggaatgcatcgtatgcgataagaagcaaaaacgcacgaagaagtaaaacataaccggttcctatgggatccttgccagaagatgcgcgggactgtgaaatatgccgccgaaagatccattcaaccggtatgaagataaaggtgatgatacatcgaaatatgtacggaaaacgagcgttctatgtgcagaaaaacatcgccgatacttgtcgccgaaataccgggacgagaagaaaggctcatgaaagaatgctaaatgacttcttcttgagactgaaactcctccattttccatgatgtccgcttctgtcgtgtttgggatctttgagtgtatcccgctcttcatccagtcctgtatgtctagtatgtaagccatgagaacctggagattggccgttaggtagttgttgctgtgattcggaggccccgtttcttgatggtgggtgttccgcaataggtgttgctgagtgactggatgaagaaactcgattctctttatctttgccgagccgatggctgaagctcttgctaccgcgcttcagacggctcaagccatggcttgacttcttggtgtcatcgggggaatgtcgacgatcttcctcggccttggacgccttgctcgcctcgagcgcagctcggatttcagcatcctctcgtcgctgttctctgattctcgcttcctgatccctccggcgctgtttctctttttctttctcgtttgcttttcgctccttttcctctttggcccgttcctttttgaaatgagagtcgctcttcttggggctgagagggagagaatgaatgtccggtattggtggaacaggaggggtggcagatgcagtagtcgaaggatctgcgggggaactttcagagtctgcatgttccgggtgagggaataaaggaggtgcagtaggggcccgttggagattgctgaatcgggctggttcactgggtgatggtatctgagatgcgctgtgaacatgggccaaccctggagatagaggatagccattctgttttaaggttgagtcgttgatatcggcgacgctcgtgtttaggtccatgttttcttgctcttgttctttcataacagcctcaagtgtggtctcctgatagaataggacgtaggcgcaggcgaggcctggcctgtcaccaaagaaattacggacatagttcttgtccacaggctctaccatctcatcgtcaaacagcaaccatccgcgatcttgtgttttaataatggcgacatagtgtccatgatatggcccgccaccgatatgcaccaccactgcatacagctcgtataaacgatccgggtcctccgcatcgtctgtcgtattgaaaaggcgaaggtgatagggatatacaaccctatggaacagcttttgaagtcgttgcaggtcttcggtatatttgaatcgtttgaggtgcagggccagaatccgaggcaggcgcttgattttcatcctcttttccgcctcttgaagaccaccgcagttatcacagtggaacttgtttctttcgcaaagcatctcctccgctgagaacttcctcaaacacgacgtaaccgacgagtgctgttcaagatctaccgacaagtccaagaaaacttcgtcacgttgcgaaaccttctcgcaagttaaacactgtgtttccgaggtcaaagtcccttcaaataattcatgtacccagcgagtagtgttgggtgttttagagcctgaacttcccgatagctcagtcgagtctgcgctttcagctggaggaagacttctctctggttcaggttgtttagatgcctctgcctccacgttcgcaacaacttcgttgagaagtaggtttaggaattcatgggcatcttgatgcatggcagtccgaaacatttcgtgttcgcgtcggagaacatccaaaaagtgctgtggtcggattatacctatccgtgactggcttgcgacaacagactcgaataagtctttcaacgacgtgaagagggactctgacattccatagctggtcgcgttgttcttagtctccaagaggggcagcgtctgtaatgccatcttcttcttatattcaggcgagtctttgtcctctggtttttgcggttgattcggaggcgcgccaggacgctgggcattggcagctttctgtttctcggccagcgcctcggcttccaagttggcggcgaagttttgatagcgaagagtatttgccagcgccgcttccagactctctataggagttcgggtcgggtaattaacgacagcctctcgaaaaggaacggaataatatagacactgtaggatcgaattacaataactggcgagatgagcgtcagtaatgtgctccgtttcgcacctctgcaagtgcaagctgcccgagaccaagtacacatcgacttaccaggtattaccgtactaaaaatagaagacaacattagcaccatgatacatagcattccaaaaatcacgacacagccagactcacattctccatcccaaaaaacttgtcactaccatcctcgcggatcgcacccatatcctggagcatcttttctaaaggggtcaccgggggcactggtggttctttctttgcgggagtcgccccaactgagggtgtgggaggtccctggacaaatcgagaattagcatttagtttcgcagggtaaataggaatatggtttggtagagccgctccccctccttcctcttcttggattttttttttcctgtttctctctttcctttcttgcttatcttggtatgtccttcgccacaccctggaaaagagaccctatcacgatggcgaaacgagacaaaagaccggaaggcaaaacgaggacagaaccactcaccacatctctgcgtagactccttagaaacgaccccataattgtcacaacagatcttgactcgcgatttcaagcttcatctgacggtttttgaagcagaagccgacagcagggccgctggaggggccgaacaggcgttggtcagacaacgcgcaaacgaacggacgatgcgacaagcggagagatgagcggccaggaggagaaaaggacaattggattggatttggtagatcggatggtaaccactacgtaaggtgacaaggaacagcgtgaggcataaggtttagaaggtccgcggagtcgatggaagtgaaagaagcgctggagggtgtgaacgaggaatggggcggaatgtgaacgggcggcggaatcgagagctgtgggggcaccccgtaaagtacgcaggggaaattcaggctaagctggaaccttaacaagcgagcaaacaaagaaaccgatcaatgaatctaggttctagaggtctagcaagtaagaactaaaagaccatgtaaaggggaagacaagaaggaagaaagagaggaagagagagaaagacacgaagggggggagttgtggaaagaggagagagaatgaatgggtcggatattgagaatggtaactcagatcggtagtgacggagttagagagcgaacgattgattactgttcagcttatgacggatggtgcgcgggccccaagccatttggggcgacttcgacgggcggacgtgtggattggcggttggggaaaaatgaggggggaaatcttgagggatataataaaactcaatctttctggattcttattgataaagtaaaagagttgctactatttctgatcggaattcacagccattgtccatcgtaactgcacctccccattatggctgtaactgctttcatattgggttcggtacctgaaagttcctgttctggaggaggcttgtgtatgtatcggcgtcggtattactggttgtatggggctttgtccgtacccggtcggctgtatgtacagtatgtaccagatatctgtcgggaggaacctgtcatctatgtatgatttcacggttctcgattcctctagaatcatataaagaaaattctgctctttggaccctgtctgcaaaaaggaaggaacaacttccttgttactatggtcccgtaactaatgtatcccgtatgtaggatgtctaccaccccccgaccctcctccacaaacctatcagcaagagagttttctagaaccacagggactttgaataagtcatgggtccagtgttcccttccgaaataggacatgcgatcgggcagaatccgcccttttttggtctgaaaagtaagttcaccgtcgttgaaaagcccatgtcatgtatggatgccatgcggcattttcaaacgcaaaactccaaactcaatgaacaagaaaaccgcgtggaaagaacagctggccaccccttggaacgcaagcctccgctcagagcaagcaaatactgtgctactaataataatgactcgcattattaccgtcgccagggttgcatcgacaggaatcggagcgttgattaccaggaatcttattcgtcaccagccctttggcgatggcttggctctctttcccttaacacttttgcggttctctctctgccttgtgcaacggggaggctgagggaccgaatcagccgaagggtcgagatgtcatgcttctgtcagccaccatgggtgatcttttgtggtgcgacttgaaggcctcaacggtggaattgaacatggttcatcgccgagacagcctttggctctagtgagaaaacaggtgaattgtgtgatggatccgatatgaagctgcctcaccacagtggggggcgggccagtgatggaagcgctttgttcctgggcgcctcaactaataacccaggaacggaaatcagatcccagaatgtagatttccaatttggctaggcttagtagtagcgatgatttaaattgcaatcttaaccagccaggcagagaaccagaatctgggtgtaatctggatactgcctctttatacattacagaacagggttaacacctccacgcgatacatcggtaacatgtggtatgtattatggaatcacgctaccgcagaaccacgtggaaacagcggccatgataggaatatgtacttccgaccaatcgcataatttatcgagccccacctttctcctcaccccaacattgaagatactagcgtcataccgagtggattccggctggatacgtttccagactttccgtcgcatttccggttacggtcaggacaatgccctattctggttgaccgttggattatctctttttgctacatctgtcaaagaacatggatgattctggagaagtaagattaagaacccgacgaacaataccacacaatggacgacatcatacctcaacctatgttacagtggtagaagtaagacgccacaacatccagtccagtttcccatactaaatctcccaggacattcgtgtgtggctggccccaagccaggcaacatcataccgaaagaacactagcactgaccgatatgtgacaccagcaaattagaattactggtagttgatccacggagaccagcgcaaggctcattggacaaatccacccctgagctcttaaactaaaccgccgtgggcgtttaaacagtgctctcgccccccccctcacgagacttaggctatgtgggctgactgctgctcctatggacggaggccctgccgtggggagtggagggcagtgagctggacagccacctcgtaatgaacagctttgatcttaattccaacaaccatctatctgcaatgagagcttaactcgggcgaagctctgtcgataattatgctttagtatagatatccgatatgttactgttttcatgcacccggataaggccccctttcacactactatatatatgtccccaagcctcccaaacaaacttcttgccagtggcagatgacagggtcgacaaaatgatcgattgcggcacattgacgttctccgctatattacgatgttaaagcttattgttctactcgatgattatcttacgtagtatatccacgtaatgcccacccccatctggatactcccttgtccgttttggggttgacaatgcgccgctttgtgttcgcttttgcgtccaccgtttgtcgtcagcattataattcagcctctgacaggtgacataccgccctaattgtgcttccccagttctgtaaccacggactaactggaccgggggaaaacacggagtagattgtcacgttaaaccacgtttacctcggccgagacccgttacaacctcttcaaaaaccaaagtagataatttgaacgagcaagaaatacaagtgattgacttcttctggtttgagtattttttgagtattttttgagtattcatgtagaaacgaccgataggaaaacgggaccgtttcaaaaaagaaacacctacaaaggcccttgtgaatccacaaagggctccaagaaatgaagtaactaaaagataaagaaatggtgacatagtcgaacagcttgctagtgtgttgaacgctgacagtcaagagtaggtcatgaagattcagtgataccgtctacagcatgggaaacatatggaagcctcgagtggttatcattggaaaactgaacaatctataaagcaaaaacaacgccaaccatactggttcaccggatatatataatgcatagcccacgtcttaacgatcatccatagcaccattaccacgcacccacaattccagcgattgggatatcaataccagttgtgtaggagctcgcgtcgctgaggaggtacacgtacgctccaccaagctcccgtgggtcggccagacgaggcataccaccgtagtattgcatcttgagatcccagtccggagacttctcaacgtagtatgtcattgcggtacgaacgaagccgggagaaatgctgttgacgcggatgccatgttggctccactccatggccagtgtgtgacacatattccggactgcggccttggtcgcaccgtaaggggcagaaggggcagcctgaaagaaatggttagcgatgcccttcgttgaagcgactggaccgagctatacgcaccctatttggtcgataagaagtcatactggaagtcatgacgatagaccccttgatgccaagctcaatgaatttgcgtgcgacaatttgagcgcagaagtatgcaccaaaaacctgatacctgttagcctatcatcgtgcactagtggcaggggaacactcacattgagattgaagagtttatccaattgttcacggtcaaacttgagtgcaggctgatgcttggtcattccagcgttggccaccaagccatcgatccgacccgtttcctcaatcactttgttgatagcattctcaatactttcttcgctcgtcacatcagtttgaatatagcggaagttgctgtatctcttctggagctccgcaaagtcctctccaggctccatcaggtcgaaagagtatacgaacttggccgagttcgcgagacagacctccgcgattcccaaaccgattccgcggttggcgcccgtaattgcgattactttgttcgcgagggtaatctgccagctgaagtccgaagaaggcatcgtgctgagatatggctgtgcttcaggcttaggagctgcagctgcagctggagccggagctggaacattctcggtcgcggcaggaggcatgatggcaatggtgatggtgaatctggaagaaaaacaaatatatggatgagggaactggtagagatgtccaggtccttcaatatttaaatggagaaatggaggggaaggtaactgccgattattctgagcgacgtcaactcttatcggccatgccccgagggtgggatgcaaaactgcgtcatagcccttgatttcggctcgaggcaggcatctcggctcacggagcattaagtaatagcatttaattgcttaaagctactgtcttgacgtcatgagacaaaatggccgtggatgcaggtgctttggccgaccccagatcaacaacaagggcggatatgagcatatcctggggcatttccgaggtgggtccgatctgcctcgtcgcgaggcacaacccttcggatagaaccaccaaacccttttcaggtcccaatcatgaacagagtttgcggggaagccgtaccggttttgcggaggtggattcaggcagcgctttagtctgttagaggcatcccgggttagattgttgccgagggcacagactatcgtgcgggaagatgtcgcgttcccatgggctcgtcgatggcctgactgcggcactttgctacagctggttggcctgggtatgcgacgtctaatacttgagggaagtataaatatccgttgatgggttgccacgactgtctcgtccagtttcaagggcatagaaagctagaacagtttgttggttgtgttgccttctgttcatcatttctctgatttcctcactctcaaggttgtccgtgcgatacaaccttctcaatggcaggccatctggaagtggagggtaaggaagacctttcctcaaaggaaatcgaggatgttggcgaggagactgtgccaccatactcacccgaggaagaggctgccctcgtgcgaaaggttgacctgatgctccttcctacaatgtggatcatgtatctcctgtcgtacatggatcgaacaaagtatgtcggcgttgtatccttttcagacctcgggagcaaagatattacactaatacccatttgcacatagcatcggaaatgcaaagatctcagggatgcaggaagaccttaacctgacatcagaccagtattcgatttgtctagttgtctttttcatcggatacgttgtccttgaggttcctagcaagtaagcagccatccattgtctcagataatccttatgctaacctactgtcatctccatagcctcatactcagtcgaacacggccctctttgttccttcccggaattatggtgatttgggggacgctgacatgtgtcatgggtgtcgtgaaagactttaagcacctcgttgtattacggacgttgataggtatgaatgttgtgaccattcaatcaagcgctttgataaaaagaccatatactgaccgcaacaggttgcgttgagtctggttttgcaccaggcatacttcttgttatctcttcctggtacaagaaaaccgaacaatcgaagcgatttggtgtctatatttccgccgccgtattgtccggtgcgtttggtggattgatagctgccggtattgtcggtggcctagaaggcgcacacggcattaggggatggcgatggctgtttattgttgagggagctgctactgtaggattcgcattaataagtttttttatacttcctgattttcccgccacaactaagcgtctatccgaaagagagcgatacgtcgccattgcaagattggaatcagacaatgtcacggccatgacggatggtggcgagcgattgagtccatggcaggctatcctggcatcaatgaaggactggcggacatggatgttcgttattggatacatggtaattggattcaccctttctctcgccctgcgcaatactgacagatcttaaggtcattgttggtgccagcacgctttcttacttctacccgactctggtcaagggtcttttcggcgatgcctccaccatgagaatcaacttccttacaatccccatctatgcagtagcatttgtctgtactggcatcacagcatatttcagtgacaagattcctttgtggcgtggtgttgtcattgctgcctggctgacattctcccttgtatgctcgatcgctgtttgtgcggtatataactatagtgctcgatatgctcttcttgtcctcatggcagccggtttgtgggcaaccaatggaggtacacttgcctatgcctcctcggccttcgcagatatgcagccgcaggttagaggtgtcagcctagcgctggtgaacgcgctagggaacctagcccagatctatggttccgtatgtatttgcttatcaatccacagactaagctattgctaacgttatattagtatctgtttccagactcggacagcccgaaatatattatgggctttgctgtgatttcggccatgttggcagttggggtgattgtcttcctgattctgcatgtttggattcgtcgcaaagccaaatcagatgcgaggcagtataattaggacagcgattgcagagtttgcgcatgattgtatcttaagatacgagcatgaggttgaccagctggcgcgtcctaatcactagcggcgacaatggtagaggacccttgatatgaataacgaacaaatgtatatatatatgatgagtccttgacgaatgcataccatagtaggtaatacaccacatgtgatccagaaacgtactgtgccgcggacgtctcgcattagctggaagggaatgtgcctgagggtataaaagaaggtggcgcttcctggccgtcaactggagttcagatatgacgcaaatggagagattctttgatggttctgttggccgttgtagaatacccttgcttttcgctgatactaatggtccatatctggccaccctattcaaaagttggatcaatattacgtacgtcatacaaactcatctagcaaaggcagagagctcatctttctgatattcagcttcaagttcttttgttaaggaatccgcaggccagcgtattcgtcgttgacacttgtctaggagatcaagcaatgcagctcgttcatggggagtatgaacaccgagccctgctgaaacgaagttagaggtaaacacatagcaaaacacttggcggggggcaagttacctccatatagacactggagtgagacaaaaaaagccatgtcatcattttcgtcattcgtgcgagcaattccacaaatagtgcaaagagaggacgtaagaagtttctgcgcagctcgatagtcttgaagtccgccaatggaaggacggtgtagaatgactatgatcctggctaggctatgaaattgcaaagcagccgcacaaggagggggattgacccagattggggggaagacatcggagctcgaaggtactgggagtgggctgaattcccgcggaagacagtcttgccattcttgtaacatatagagtaactcgttccctcgttccaagcgttgctccaggtcagtcgattctgactcttcccgtgaagcgtagttgacgcactgtgcaagtaggtagattgcacgggtcgttagttcgggtatcgtgaggactgaaacatgcttttgtggcctccagaaactgaagactcggcgccgctcgcgcattgctacccagacatcctgtctaagccaggcccaccacacggcttgacggaggcctccgcattcaccatgattgttttgatatcgctgtatccagaacactcctttaagatgtcgctcccagtcccggttggagccatcaatcatctcataggtactaattaaaagggctgtggcaattagctcttggcttccagcatatgattgataacgcatagccttgttcaggtaatgtagtgtttcatagtaatagcgaacagcgacattccgatcaattgaatatgacgagtcagaatcgcgacgatcgccaggggtttccctgagaagcgtcagatgtctcgccgataacgccaataacgccttcatcagaccggtgtttctcagagccagatggggaacgacagaacagaactgctgggatgaatcaaaaaagtccaaccagccgctgaacgtctgcacaaagtgagtaaataaccgaaactcctgttccgatagttgaatgggagccgatgtgctccacgaagatggcacgtccggaagagcctgtgactgctcatcaacagctgccaatggaactttctttcccatttcagggtcatggtgaaatgctgccgcctgaaagctttcccgttctctcaaagttcgtggctcaaaggccggactttgcgttgagcttattgaagcttcgtctgccgtcggcaatgggaatctctgctgaggggatagcaaaaactctctgtctgcatttgcagcatcctgagccagaagctcaaaccagctcaggggcgccaccctcgatgaggtcgctgatgactccgtaccaggtgaaggtacatattcgacaagcggagatgacactgatctgctcgaaatcggacggcgagcggatctattaggggctaatgtttgattaaaattggttggctgtattgcgtgttcttggtgacatgcatccactagcacttgcagaggttcgtgaatctgtgcctgggagcttatcaccgttgggatatcttggctctgggttgtgctcatagacgcgtgagatgaagtatcaatgccgttcccatagacgcagggccgttgaccttttgcgcatggtccacattgtgggcggatctttgacgataagcgataatttccactacccaagtgtttttatgtggactgatcaacttacctcgtcgcatttgacgtggcgacgcttgcaaattaagctaaggacgatcagtactactcgcaaaatgacaggcgcaaaaattccagtgagactgaccaccccgtgttagttcgcaagcctcgcccgcgagatttgcgttgtttccgaatgccactctgcgggccattgttcggcatggtggagaaagcccaaaaataaacaattatgtgacagccgatatcaaccaatgcaaggatgttggactttgcattgctggaaagtcgggtcggggttggagcacgtgccgaggctgcctgagccacgtggcagcgaactgacctttgtgggccttgttctccttgtccagcgcttgcagataccgcattagtcattaggaccacctgcctcgtcacgagcacatctcgttatgagctcgagctcaattaaagaacatgcgaaatccccacgacgatagtgtttcttggacaccaaaacagctcagtaattatctttaaccccgctttacaatgactcggcgtgcgacaaacaagaccctgcaaatcttggatgcagcggaaaaaggccgatatggcgttcttgcagcaattgcgtaggtcatagtgattgctatttcggaagtatacaacttaacaaatgtccttagctataacgtcgaacatatcactgcattcgtccgagcagccgaaaaccgcaagtcgccgttaatcattcaattattcccttcggcgctgacccaaacaccatcacttgttcatgcagccgcagccgcagcgagagcagcctctgttcctatctcacttcatctcgaccacgcacaggattatgatcagatcaaagagatcgctgataccctcccctttgactcgataatggtagatatgagtcattatgagaaggaggaaaacttagaaagaaccgcatctttgcgtgaatattgtcacgctaggggaatatcgacggaggccgagacggggcgaatcgaaggtggtgaagatgggattatggacacaggtgatttggaaggtatgaaatccaaatgttgaactcagaatttctaatctaatactttgtacaggaatcttaactagccctgaagatgttgaagacttcatacgtgcgggggttgactatctggctccgagtgttggcaaccttcacggtgattatggtcccaaagggccgcaaccagacatggaccggtaagaattgcaatgaaaagtacaccgagcgtcgctgaatctcatgaatgtgttaggcttcgcggaattttcaaagcacttaatgggcgcgcccgattggtgttacatggaaccaacgacttttccccagagctgtcgaaagcgtgtatcgaagcaggtgtctccaagttcaatgtcaacaagctcgttttggacccgtggtatgactatatcagagctaatatcaacaagcctataacacaggtgattgatgagggaattgaggttcttatacagtcaatggagcggtggatggacataatgggcagcagtggaaaggtataaaagaaattagaattgcgagattcttctcttaatgttaataatatatcttaaagccatctaaaggcgagcatactgtaagcgttagactcattgtggtactttttactacagatgatagaaaattacgttcattaaaaatgcttatgtgaagtagtaaagagttttcctcaaaaggcgtagtcaaatcataggcgacagttattacgaaggatttatggcaccaggaagttgtatcgtgattacaaaagactgagccaacaagggcaagtaggataattgggcgtttgtcctatagaatggtattaaactcaacacgatcatgatgcctagtgatagtctgtcggagatataagtattagtatgagatatcaattgcgtagagccatcgctgcgagcgagtatattgtattgactgaacccaagctattaaattgccaacttgtactctaggatagagctgttgttgcgcagaaagacgttattcgagatcacccgtgctgtcctcatcagctgcctcctcatcatccagtaacggcacaaagcggaaatctacaaaggtcactgtgggccctagcgatcccccagatggtcttgtggtattgctcgcgccgctggagccgtgtgcgtcgaattcaatcatgaactgaagacttaaaactccttgccggtcgcctcgaatgctcactttgttagccacagacatagcacgagatgccttctgcataagggaaaatcggtaattttgcttgatgcgagaacccattgacgatggtgggctgacaaggaaggtctcggtgacagtaggcgcaagcttggtcctcttagcccgagacctggatgtgccgtcatctgtcaacactttgcgagactgggacgacgccccgttgttcgggccttgttcctctattgagaactctacagacgattcgctgaacggaccaccagaaccggacaaggcgaagaaaggttcccgatctgccgaggcggatatctttaatacgtttggattagtggcacccagctccacaatggcattatgtagccaggcagagcgcataatgaccttcattatgatggcatcacgttgaagagggatatcgacttcgccaccatcgggttcgtaggtcgttagttcacaagtggtcttgattcctgtctctgataaagtgatgctcaaaggggaaccgttctggaaatattgcaaggtgcatgaacgatcaaaaagcaatgcgggtgtggtaaaggcgttcgatgacgaggggttcgacggttggacactaactgccttgttggccccagtggaggatggatcatttacaccaaaaatcttcagcgtctcaaggagtgcagaaagcgacacaacaaagcacgggttgtaagtagcatctgaagaatcatcaccgtcccccagatctccagaagtgctgttcggcgcggctggtggattgaaggtgtatgtagtaaagagggctttgtcgagaaacgcaagtccttgtattactcggccttcctccacagaaaagcgaatcccatctggggtaataagcacggtagcttttggtacaaaaccaatgcactgtagcagagtatagagatggtgagcattgctggaaacagcagaaaagatgggttccacgtcggccatggctgggtgtacgagatagcggaaatgatcgaaaggaaagaactcggacaaattagattaaaagagagtctgcagggaggaagagcttcgacgtttctaatggtataatccttctgcttctctcttaactgggtatatggtacattgaaaagatctggaagtcttcctagacgtagaccccaacagcgcagatcatgtatacggccccgaagctggatagaggtattagccattgtcggtccgtttgcgcaacgcgcttttcttacccgaatgccaacgacgccgggacgccaaatgaagcgatactcaagaaagaacggtctgtttggacgttagaaaaaggatgaaagtaaattggatagggacacaaactcagtccgaaaagaccagtcaatatgagtgctggaatactcgttagtgctatcggttaatggcctgtagcgcgaacctgtcttaccagaaagcaagagggtgaagccgacggagaactggctatctttggaaatcagtggagcgtaagggctcgcggaggctgcctcccaaacttcgttcaacgacatggggatagattgatttttatgaagcccagtagatagcgactagagcaaatatagcatgaaacgaatgaattggagactattgaaagtttactgaagttccctagaacaagtagatagttatctggcataatggtgccggatcattgtgttcccgataccgaccccccatatcggccaaacgtggagatcgcgccgcttggactaagagctgacaagcaagcgttataacctctttacttacttgtacacttaacaagaatggcgtcagaaagtgagtggacagtgctgaaatgcgattgcccgagatccttgatgtgtttatttactgaacgaaggtccagacaacaaacggaaagcttcggaggaagccctttccccagattcacagctacagagtaagaaagcgcgcaccgattccccagagagggaaccaaaggtctgtttcttcgatacaggaatgctatcggcggagtgtgctaacggtaacttaaagtctgaaggtggaccattgggaaagccaccattgaggattgttcctttcccggagaaggtaggccgccttgtttgatcgcttatgtgaacaatgcttatcatggacctttgatagccagccgtactagaagaacgtcgaggggagatcgaattccgggtcgttaataatgatggttcgcgcgacagctttgttgtcctcactggactgaagtgcatctttcagaagcagctcccgaagatgcccaaagattacattgctcgattggtctatgatagatcgcatttatctatcgccattgtcaaacatccactggaagtagtagggtatgtgcgcgtgatctttttcggaggcctggcacacgctcttgctaatgatgcgtagaggaattacatacaggccttttaacagtcgcagatttgcggagattgtcttttgtgccatatcctctgatcaacaggtgaagggttatggtgcgcatttgatgtctcacctgaaggtaactggtctcgacacattgcggtgcacagggaatgctaagcgctatacaggattatgtgaaggcaacgtcgcctatcatgcatttcctgacatatgcggataactatgctattgggtatttcaagaagcaagggttcaccaaggaaattacactggataagtctatctggatgggttatattaaggattatgaagggggcaccattatgcaatgtacgatgcttccaaaaatacggtatcttgaaattggccgtatgcttctaaagcagaaagaagcagtacacgccaagatccgtgccttcagccggtcacatatcatacacgccccgccaaaggaatggaaaaatggagcgtgtaaaatcgatccgttaagtatcccggcaatcaagcaatctggatggtcacccgacatggatgagttagcgcgtcaaccacgccatggaccgaattacaatcaactactacatctgctgaacgatatgcaaaaccatagtgcagcctggccttttacgcagccggtcaatcgtgacgaggttcctgattattacgaagtgatcaaggagccaatggatctgtcgaccatggaggaaaaacatgagaaggacatgtatccaacaccacaagatttcatcaaagatgctatgttgatcttcgacaattgtcgaagatacaacaacgagaacacgccttatgcaaaaagtgcgaataaattggagaagtttatgtggcagcaaattcgaaatattcccgagtggtcggtaagtacatgagtgcagccctggtttggtgatacccgcgttgctaacctttgtcttatagcacctggcggatggccactgatcgattgaatgattgcatgagcttggagaggtaggagtttcggctgctggcgtttgaattttttctgaagacggtgtcatgagcaaatacccaattgatgcatggagcatttcggtttttatttttaatatgtatttctaggtgataaactcgaggggattcgtgcaacagtgctattccttggcattgtatacttccttgtcctttcttttttttttatatatatatttataacagtttccttccttccttgaacagtctaggcgacattcgatatagtcacatttttattgccgatcctttcaaggcttattttttttttggcaaagaaatgtgacatatctgggtcggcgatccttgaattggatgagtatccatggatgatggcatcccttgccgaaagctgtcgagaacgtggaggtgatcatcgggccgtgggtccaagccaatttaatttcggatcaacgttaaggcgggccgttagtttgggcttagcgggctgccagccgtgcagaaagaaaccaaccatcccaagtctcttggaggctttacttgaaggctggtgtgtttctatttctatttctacgtcctcactctggactctgcagcttgcgatccttgctgggcttctgaatggattgagcctgacttttgggtttcagctgcgatccggtggctgtttgtttactctcatctaactccccctctcccaggggtttctgtgacggacaggctccaaaattctagattattcacgacaaattccacccaattctcacacccaaatcatttccctcgtcattcgttactttactcattcgccagaatctctgttgctgtcatcgaaatcataattggaccctgcggtttatttacggctaatccctcccgcaacccgacctagacgttctttccccttttcttagaccgatctcactattcgacataattatcattctaaaagatggcgtcgccttcgcttacggacttggagcagcggaatcggctcccgactctctttgaagtcctcagccgtcgtacactagctcctgtcgatcttttttcgttttacatttacatgcgggaccagcagcgctcggtcgattatttggacttttggtatgatacatgcgcgccttggcgtaccaatcgcccgagaagcttctaaccatactgattttaggctcgatgtttcgcaacatatgtctttgtgtcgtcattatgtccgagagttgcgccgatctgttctagtagctactcccgacttggagaaagcagatagcaaaggctcctctgatgccttagggaacctcgagacttttggcgatataccgctggtggaagccggaccctctggtttgcgacacggcaaccatgacttggatgatcaggacgccgatcaaagattatcggcattcctgcgcgctgatggtcataacccagggcactcgccccaagacagccttggctcacagaatgccgcccgcacaccatctaatgaacagccacctcgcccaagctctggaacgcggaacgattctacttcgcctggccatactgtggcacgggccgacattcgtgcaagtgcagagaagattctgtatacatacctgcttcctggcgcagaaagagaaatcgtactgccggaggatatggtatctacgatcatcaatttggttgaggatgacggccgagatgacccagaagtctttgatcccgccaaagactatgttttccaggccatggagcgcgatgcattcccagggtttttgcaggcgaaggccctgggtaaccttgtcccgctgagtacaattgcccgtctcgcctttgcgctgataagctttggtggcgggttttggggtgccttctacgttgtcctccgcgacaagccaaggcacatccgttgttgggtatgttgtagtggtttgcccggtttttgctgcgcttcgacactaacaatcatgcagttgatactaccgtttattgtcgcatcctattttattgtctcatatcaatataagatcgaccctgtcatggcatttctcggatacagtgaatatacctttatgaactggtcgccgatccgcgaaccttacgtgcgaaagctgttgaacaaacgcgccacggcaactattttaatcgctgcattcgtcgccaccgcgctcagtgtcctgttcatctttgttcctggtactatgctctgagctcactggcgtcacacatgccagattctggaccgagtctttagggttcactttggtgcctctattggaaggtttagtgtgggcgtgtaatcccggctgcccacagccggcagctctaaccatatggctacaaggtctggcatacaagatcagatgtcgccttggctccggccacccagctcttctggcaactgcgacgtgctgcactgaacagggtggtcaaaacacgcgaaactaacgcatatattattccccgtcatagcaacggactcatgatcctgaacctatatgatcagctgacagggtatcctagtttcacggatcccagttgccttaatttccggtcagtggaccgtctacctttgctctgccaatatcgtcttcccttgttccacaccatttttccaaatttcttttttctttgtccgtttaaattctgagaataccccttttttgctaagattgtccgttaaacgaccttcagcgagccttttggtttagtgttaagtgcatgagagttaggctttacaatgtgacataaataatgggagtaatacattctaatgggcgaccgcgtacaagttggacgggagagagagagagagaggaggatctaaaaaggccgtacgtggtgcttgcttcaacacctagttgtcaagaagatctagcgataattcgtcatctgagaaagagatatggtaatcccttgagtttatcacatcacattaggatttcctccctaaaacacgcttcgcatgtctagctccagcacccgccgatcccgtagcggacgatcctgcgccctggtcaatatccatcttcgaggtagaaaattgtgaatcataggctccatcagcaccgttgtcccagtatccatcatcgaagtcatccccgctgaactcgcgcttattgccaacgaaccctgaggaaccaccctttgcacctccgtgccaactttgctttttggatcctggaaaccgggggtttgactcacccccatctgagccccagtttgacaacgttttctcaaataacaccgcccgagcctgttccttcgcgcgccgctttgccgagtcggtcttgatcctagctatctcggcttcgatgtcgctgatgacgtcgccgcagcgggtctcccactgtgtgaggattgagatcatcgttgtcagtgattgaggcttcacgtcccgtaagggtgcgacggaggtcacattgatggtcggggggttcgtcaccggggagagacgggcggtgataagagaggagtagatggcggttgtgactagagattcgagctcggaaggagctgcgattgagagtgcatccatgagggtctgatatgtgagtggcttgatggttgcagataggctgagaagagatagaaggcggagctttagggtttgttcattgttaagtggagggaggttcggcgttgctgttttcgagatgcgttaattaaatcattgatgatattcataaactccatgagactaagatcaatttcggtggggcatactttgataatcctgccatgtaccccaggcaaagacctccagtaatgtaaggtatccttgatactccgcgggggtgtcctctgaccggagggcttgaactgtaggcgtctctagcagctctgcgaatacataagtgttcggactcgaagtggcatttgtgatcaggtttgcgacgaatttcggtgatgtagcgctatttgagttggccaggaggacgaagggttggagggcctccatggcccgggagtgtgtctgatccatttggactgaagtggttgtttggcgagcgttgataacaaggtatatgttatatcccggtattgtctgttgttattccttatcagagagccttccctactccatgcaaatcacttctattgccgcttagaaactatgcagtctgtcggtgtgaatgggagatgtttgctgaaagcaatggtgatgatatccaagtgatgtcccgaatggggtgtttgtttggaatgcaaacaatgacatttatccccacatgtgataactaggctatatcgggaaatttactcttaccatgtccaatgttcaggctttttccttcctttattttctctgccacattttttggatgctaatataactgttttaaacagttcgattaattacctcaaagtagttcttcatcagtcaagaactttttgtccgattattggcagctatcatacggagtacgctgtccttggaaacctaatgcccaatatgccaggaagggcgcatagtccgacaaatggatgcaaggagactacagaactatcatcaaggaacctgcatcacatagagtcgaaaccatgaatcacacaacaatctttgagaacattctttgtcagaatctcaggagcaattgtcacccttaatatacttgcaaaggaacagcatagaggatatcaggtaatagcgcttaaaatgaaacattagaggctcttgactgtttcatggtctggaccctttcctctgacgtgcagattcattgtttcaactaataacgatgattattttgacatcttgaagtttctttctttcgtttcttaaccaactgttcctttttgttggacctggactcatttctgggttacctattgtggtctatttctggaatcgaatccatggaagctgctgacgaggaaaagtacgtggtctttcttccatcatccgtgctttctggccgtacggtacggtaaggctactagtccatgatccactggacagccaaactgtggaatgcacatcaatccttgacttaatcccaaccccctcccaggctggaatgtagggtacgagtagttttttcactgcaaacatgaaaagaatgagctttatagtccttgtccgtcatttccaggaagaaccccttggaaaagcacagggagacgtgaatggaaaggggacctgaaaggcaatctatctcggatccgatctaatctactggtggtaaaatacgagtaccggtggctacatttgacctcaaatgcgatatactccgtactttgcatttcccacccccactccttagacaatagctggtacttggcatcgatttataatagagcaatttcctctttcttttgcgtgcatatgcaaatcattgaaaaacaggcggaaacccctcagggcctcagctcactgacttcgtcccccattggagttcggcgaagattaaatccagctcggcgaagattaaattgatcgatccgctcgtacttccgaccgcatccgccttgattttccttccatcgaatccactagttgacgtcttttgttctttggcgctaacatcgctccgttcttatttcaactaaaagggccagatagccgctcctatgcactgacacgtttacgcctggcttgctttgcctggtttctgatccccgacaaggcacgatgttaggcgccgaggttgatggctcttccgccgcccgatcgccagcgcatatggcaaccaccacagtaaatgtggagggaatgacgtgcggcgcgtgcacgtccgccgtagagggcgcttttaaaggtgtggatggtgttggcgaagtgtcggtgagcttgatgatgggcagggctgtggtacaccatgatccaaacgtactatcgccggacaaagtcgccgaaataatcgaggatagcggctttgatgcgacgattatctctacagatagcccagcgggcccatcgggtgatacaactacagttaaagagaagggatcaatggtctcaactaccacattagcgattgaagggatgacatgtggtgcctgcacatcagcggtcgaggggggtttgaaggaggtagctggcgtgaaatcggtcaatgtttcattgctctcggagcgggcggttgtagaacacgatgcatctactgttacacccgatcagcttgcagaaatcattgaagaccgtggctttggcgctagggtgctggacaccgctgcgcctcagagcggagcttcgcaggagaccactgaaactacgtcgcgactgatggtcactactgtttctatagacggtatgacatgcggcgcatgcacgtcaagtatcgaaaacattttcagtggtgtggatggcttggtccaattcaatataagcttgctcgccgagcgcgctatcatcactcatgatcccgtggctttaccgtctaagagcatcgtaaatatgattgacgatgctggttttgaagcgaccattctgtcttctgaaccgcaagctcctgtctcgagtgccgtaggccgagtcatactgaaccttcatggcttacgagacgcactctcggcgggtgctctagaggaatctcttcttcagaagccaggtatatcctcagcatcggtagacatccctacctcgcggataacggtattatatgacagttcggtcatcggggttcgctcggttgtggtggcgattgaagctgccggatacaacgccctgcttgcggacacggatgacaccaatgcgcaactggaatccctggccaagacaaaggaggtccaggagtggaagcgctccttcttgttttctgtctcatttgctgtccctgtgtttgtcattaatatgctactgcctatgtaccttcgccctctcgactttggcaaagtacagttaattcctggcctctaccttggagatgttgcttgccttcttctcactatcccagtgcagtttggtgtcgggaaacgattctatacctccagctataaatctctaaaacatcgctcgccgaccatggatgtgctcgtcgtgttgggcacatccgccgcgtttttctacagtgtctttacaatggtgatggccttgattattgcgcctcataagcggcccagcacagtatttgatacgagcacgatgctgataacgttcataacacttggtcgctggttggagaacagagctaaaggacaaacttccgccgcgctctcccggctaatgtcgctggccccgtcgatgacgaccatctacgatgacccaatcgcggcggagaagatggcagaagaatgggaagcctccagaaccggtaacggcgagcagaagtcaacatctgataatgaaaggcctgggccaggacaccaaattatcccaactgaactgattgaggttggtgacattgtcgttcttcgccctggagataaagtttctgcagacggcatcgttattcgaggtgaaagctatgttgatgaaagcatgattactggtgaagctctgccaatccacaaggccaagggtagcgctgtgatcgctgggacagtgaacggcacgagttctgttgacttcaaggtcacacgagcaggcaaagatacacaattgagtcaaatcgtcaagcttgtccaggacgcccaaacaagccgggcacctattcaacgcatggctgataccgttgcaggatacttcgtcccagcaattattagccttggattgatcacgttctttggttggatggtaatgagccacttgttaccgcacccgcccaagattttcctcgcggacgataatggtggtaagctcatggtctgtctgaagttgtgcatatcggtcattgtcttcgcctgtccctgtgctctgggtcttagcaccccgacagcagttatggttggcaccggagttggtgctcagcaaggaattctcgtcaaaggcggtgctattcttgaagctgccacaaagattactcatgtggttttcgacaaaacaggaactttgactactgggaaaatgagcgtggctgaggctaagattgaacgtcactggacttcgaatgaatggcgccgaaaactctggtggctgatcgttggcctcgcagagatgaacagcgagcatcctattggcaaggcaatattctccgcggctaagacagagtccggccatcctgacgaaggtgggctgccgggtagcttgggcgattttgacgcgtgtgttggaaaaggcatatctgctttggtcgagcctgcatccagtgccgagcgcgctcggtaccgcgtcttaattggaaatgccacgtttttgaggtccagagacatttcagtaccggaatccgcccaggctgcggattctgatatggcgacgtcaaaggttcctgctggtattacaaggattcatgtggcaatcgatgaccagtacacgggaacgctcttgctccgagacactgtcaaggtaaccgcggtagcagcggttgcagctttgcaccgtatgggtatctccacatcgctcatcacaggtgatacgcacgctaccgctatatccatcgcgaacgctgttggcatctcgcccgaatctgtccacgcctctgtctctccctccgacaagcaatctataatctcatcactggaagcatcaggcgaacgggttgccatggtcggcgatggaatcaacgattctccagccttggccaccgcatctatcggtatcgcgcttgcttctggtacagacgtcgctatggaggcagccgacattgtcctgatgcgacccgacgatctcctatccgtacccgcaagtctgtcactttctcgagctgtcttcaaccgcatccgaatgaacctcgtatgggcctgcatgtacaacgtcattggtctgcctttcgccatgggcctattcctccccttcggtggatacatgctaccccccatggcggccggcgcagcaatggcagcatcaagcatctcggtcgtggtgagcagccttctccttaaattctggcgccgaccacgctggatggatgccgagaagctcgagaagcaggtcgaaatgggcaatctcagcttccgcggctcccgcaagagttggtgggaagcagccctctccgtcagtggatccagtggtcgtgttggaccgttacgatggatccaaggcacaaggttttggttctttgttactggtaaaccatcgggtcgtttggattcggacgaaggctacgtcccgttgcagaccgttgaacctgccgtctaatcgtaattacatctatggttttgttactttttgtttatggagtttatacactacatccagcatgattagaagcatgcctttttttcgggttatatgatgacctgtctgagaattgtctgatttgtttgattcagtttgttgattatactgaatgttcattgtttggattgatacgatacctcttggttatgtttatagcgtcttggtcaatgatactacttatttacattgggttgctctgatcgatgaccgtagtgaggtacctagcttctgatctctttagtgtagagagcttacaccggtaattattacagcacaccatagcaagaaggccgggtcttaatttcaggtctttatcgaaatttctatctaccagctacacaatatcaccaatcttaatatagcagcgtacatggcgcacatcatatcattaacaaggctgaaaaggagacaaaagacctgcatcacgctcgaaccatattttcagatcgtcaatcatgacaacaacgcaagctcagtcaaagaaacaaaaatgggatagcttgcttatgtgcaggaattgttcaactagatcataccgattccattttcaaactagggtttaggttgctcatcccccttcgccgaggcaccgggctcttcatttgcgtttttggcgtcgtctagcgtgatatctccgtctccgtctgcattttctttggtcgcagtctggccagcatcattgccctgctggccgttttgctcagcggagttgttgttggctccttcttcgttctcgagtgtcatctcgactcccttgccgtcttgcaagcccatgtcttctactcctagtatccggggaccccgagcatggggaatgtcttccgagggatttgtctgttggggtccagtatcttccatcgcctcgttttctataactgatgttgttgagtgggtaagtacgggctctgcggcgccgtctgtttcttgctggagggaatgctgctgtggtgctgcttcagacatagcgtcgtgatctatcgatatgtcagtggatattcagcctacaggttaagagccgatatggaagaatgtaccttcggaaagagaagctccaccttcaccttcagcatccggagaagcaacattactcaaccaaggaataggagtgagaagagcaccgcccaaggactcgtcgctgccaagggcatgatccgaaaacatcggtccactctctgcgccattcagaataccattcgactggtctccgcttgcgtgcgtcttaagcgggaagatatccgcactgctagtgaccgacacaacgcggtcaaccgctcgcaagtaggcgggaagtgtcttgtagtgcttgttagggcggattataagctctgcgagcctttggatcgtatgtggtggcttggtgctgaacagcgatctcaatgtcgatctggtggagtctagcagcaactggaggggagtaggcagatttggaccggcggatgactgaggctgggagttgggaatgcgctcgcccgagggctctgtgagctgtgtggatgtctgggagtctgctggggtggcattctctttattgctgcttgtgggtatcgaattgggctcttgcggaaaggaggcggatagattggagattggttgttgttgagaaatagctgcggtggattcgggaggcacttgaggcatggggaagacattgtaaacaatctatccgatgttctagttagaaatgagaggtcgagagcaacatggagggtagtcgcgcacatattctaatcgttcgagcaacggttctaccatgctaggccatttctcactgaaataggacgtcagtgcttagtcacgggtgggatagcaatgcctagcatacaaatccattgagccgccattggcgaccgtttccagggtttcttcatctatcagggcaatatcagttagctcatttacatagctccgacagatgcatctggaagacgtggcggtgaacgaagcgggatggaatgaagatatgtgcaccgcattcagacctcagtgttcgggaagctgaattgcaactacaccggtatgacatacctagagacatcctcccgaatgcgaaaatccaggattaaggaggtgaagttgatatcggacgcgatacgatgcgaaacgataatgccggagctttcttaggcgcgcaggcggggaggcgggtaacgaccgtgccttattggcccgtgcagacgcttatcaattgactcacgtgacggttatcgggccaattttttagaggcggagaagaggggctactgattcactttctccagattgtgtggatttgcgtctttccgcggctcacacttgcattctgtccccaaactgaattatctttataccctaacccaggatgtggaactctcctaaggtgggaatcctcggcggaggccaattgggccgcatgctggtcgagtccgccaaccgattgaacattcaatgcaacgtgctcgatgcggagaactccccggccaagcagatcagtagccacgatggccacgttaccggttcttttaaggagcgcgaggccgttcgggaactggccaagacctgcgacgttgtgacggcagagattgaacatgtcgatacctacgccctggaggagattgcctctcaggtcaagattgaacccagctggcaagcgattcggacgatccagaacaagttcaaccagaaggagcacctgcggaaatatggtattcccatggcggagcatcgcgagctggccgagaacactcccgaagaattggccaaggtcggcgaacagcttggatatcctatgatgttgaagtcgaagactatggcttacgacggacgtggtgagtcatcctttgacaaggttcatatacactgttccacggctaatatgtacggttgtgcttaggaaactatcgtgttaactctaaggaggatatccccgaggcccttgaagcgcttaaggaccgcccattgtatgcagagaagtgggcttacttcaagatggttagtactcaacctacattgcctaggagggaattgctaagtatacaataggaattggccgtcatggtcgtaaagaccaaggatgatgtcctgtcataccctaccgtcgagaccgtccaagaagactcgatatgcaaactcgtctatgcccccgcgcgcaacgtgtccgacgccatcaaccagaaagcccaggagttagcacgtaaggccgtcgcagccttcgacggaaagggtgtttttggtgtcgaaatgttcctcctcgaagacgacagtctgatcctgtgcgaaattgctagccgcattcacaactccggtcactacaccattgaaggttgccccctgtctcaattcgatacccatatccgcgccatcctcgatctccccatccctcctaagagcctcgagctccgtcaaccctccatcatgctcaacatcatcggcggtgccgcccccgacacacacctcaaggccgcagagcatgctctctccatccccaacgccagcatccatctctacagcaagggcgccgccaaaccaggccgcaagatgggccatatcactgtcaccgcgccgaccatgcacgaagccgagacacacatccagcccctgatcgacgtggtcgacgagatccgctcccagcgcagcgacatcaagacccagccccagaagtcgggcccctcgaagcctgcaccctccgtggccgtcatcatgggctcggacagcgatctcaagaccctcgttccaggactcaagctccttaaagagtacttcggcatcgaacccgcagtcgacatcacctccgctcaccgcaccccggagtacatggccgaatactccgccagtgccgctgcccgcggtatcaaggttatcatcgccgctgctggcggcgccgcccatctccccggtatggccgccgctcacaccgctcttcctgtgatcggtgtcccggtcaagggcagctccttggatggtgtcgacagtctgtacagcatcgtgcagatgcccagaggtatgtccaaccatgaacatctccaaccaatatttctctacgaaaaaaaccactaatacatatttataggtgtccctgtcgccaccgtcggaatcaacaacagcattaacgccgctctcctggccgccagaatcctgggctcctttgatccagccattcagcgcaaggtggaggcgtatgctgagcaggctaagaccgagaatctcgacttcaagggcactaagatgcgcgaactcggttgggaaaagtactttgagcaaatgtgaacaggactaggaagagttggtttaatagaggcttaaaatagatgtgcgacgtactcatgaaatttaagtagttatgtcttttggaaaactagttttattgaaattttttgtgaccttcttatctgttgagtactgctcttctagggcttatcattatatacggtgtagttaaaatatctgatgtgttagtagtgtacatctctacagaatatagaaagcataagatatagtaagagcagattagacattcaattaactaagtaacttctgacaagtcacaaccatagagcattaaacgcataagagaaagtacatgacatggcagactcaacccatgattacaagttaccggtatcaaacccagaatccacaattcaacataagggggtaacaggaccaaaaccaaaaatacaaactgagactgggatatcaaaaacatatagacagcataagatacatcttaagtcatagatcaatcgtgtgtgaggctgacctcttaagcagtctgggggttgaaagcatgttgagctcccgggatggtagcggtgacaccatcctgggtggtcttgtagccgccatttgaagtgaaggctttgtcgacctggtcggagaagccgtgagcaccgtagccgtttgccttgtggacaccattggtggcaccgttagtaactccacttgttcctgtaacggcagcggagccgttcgttgccccgatggtggtggaaccgttggaagtgcgtgcgccgctagctgctgcgctaccgttggtcacgttgccatcggatatacggccttgggcggtggtgtgtggcttgcgggtgatatcagccggggttgggatgttggaggactcaggtgcatcgccgatactgaagatgggtgattcccagcgttctcccctctccgcgagctccttatactcagtggccttgctggagatgccaccaggaagcttgatctcggggaagagggaatcgtgaagcgtcgttgccgtctggaccttagtgttagatgcgcgctgggcgacagcctgtgccttttgcttgttttcttccatcttggcgcgcgcggcatccaggtagcgggagtagatgttaggcgcgtttgcgggatcctcgatggcggcttcctttgcgcgcttgacctcgctgtggatctcataggcaaaggcatctcccctagagaatgcatcgcggatctgctgctcgaggaccctctgcagaacggggcgaacagtgcggaaaagcaatggcttgaagattgtgaacagagccttgtgcttggacttcttcaatttgatgttgaaggagtcgatcttcacggacactttgtccaacttgacgaagttctgacggtcttccctttgggcattagaagctgcgattttgaagccgaagccatcgccgcccaagaagatatccataactccttgatccgttatggaagggaatccttgtttcttgttgatgtagtaactgacatctgcaaaatacagttagcacgggctgtatttgtacaagttgagtcagacttacctcgcaagtcagcctggattccagaaacagaaagcatgatcttattgtctctcttgctgctgatcttcttgcgtccccagcggaggtagttgtcactgccgaactcgacaacattcggcaccaagttatcactctcgacgacaaggttttccacgacctaaaagaggttataagccgaacagggcttccttcgacgggggtaaacttaccacatcagccatggggtctgacacctcaatacgagggatagggacatagcggacattttcaaaaatgccaggcaaaataacatcccgaaggtccgtaagaaggtgcggcttgaaagaaacgttaccgcttgagtcccggccgaggtcaaggaacagtttctcaaccgcttctccaaaggctttgttttgggggtcctgggcgaactgatcaccaataaacttgacttcgtcaagaatgcggtctgtatggtccctgtagcgttcgcgcaacaaataacggccatggtcggagagctgatcataatgacggtcccagtcttcctgcatgacgtagccttgttcctggagagatttcctgtttctattagcgaagccttattagataatctccgtgcaaagacataccgaatgaatgtgtccatgtttttgaaccatcccttgagctcaggatctctgtctgcatctcgatagatattctccagcgagtcaaagagatcgtctaaagacgtgctgttcgcgaaacgctcgatcaaaacctgtgacagaaaatcagcagctgacggagtgattgcgctttatagaaacatacccgtaggttcttctccattctgctgatcttatcagtgccccgagtacccttaacagttccagcaccctgttgggttacatccctagtagtactgccatacttctccgcgagagataacaaggtctcgatcgcgcgttgatctaaatgaggctcattagcttgtcatttcgtcaccgagcttgatgctcgtttattagtcgaggcaactcacagtcggcacgaccctggatctcaatgatcatcttcttcatgcgccagatagcttgctcgcggcgttccttgggcatcttcttcgacaggtagccctttgtcttgccagcgagatcacgagcacgagacttctgctcctcagggatgttctcggaaagcttttccttggtcttttcagcacctgcggcagcgccagtacggccatcaatttccacagcagagtcctgccgctggtcaccagttgcagcctgagctgcggtgtcggtgacttcgttcgcttgctgctcggcctttcaattgtcaatacggctcgcattaatctgagcaaagaccgaaacttacagtggccttgttcttcctgaaacgagaagtgaactgctctttatgctttgcatagtcaggcttctcatgccaggtgttatcctcggcaggctggtcaacctgtgctagttgttcctctgacggccggacctggttggcagctttctgcgacgcatcgccagcaatatcgcggacaaggatccaggcatcgttcacttgaagttgttaataccacagcagtctgacaggttcagagaatacatacggagcttcctaaactctccattggtaatcaggaggtttccaagggtcttcaagccctctagagcctccctaccatcctgctgagccgattccctactcaaagggacatctggcttctctccaacatgttcaccagtgatgctctgggcctcccagatgaactcttgaatcaattggccgtcattcttgctaagaatgaggcgcttcgcctgctcaatgacgtcgcgaacgtctccaataagagcttgtccttcttcagacaactctttcggtggtgttgagagagccttggacttgagcgcgctgtttagagcaacgtcgcattgcttgttctgcagtacgatcatccgttagccgtcggggcgatgccgatggggtcgtgctatgtcgtcgtgtctaagactcaccgatggaagcttgccatttttgaacgctgtgagacagtgtcagtgaccgggccagaatgtgactatatctgctggatcggagctgctttaccttgatatattccatatagctgcagcttctgattgatatcctgtcgatgggtgattaaagtcagcatggaactttcatccccggataggatgcgccgtctacccaccttgtccctctgcttcgtatccatcgggcgattgactagccgggaagacatgatgtaggcgttcttgtctcccggtattcacgaggtggagaggcgtattaataacgtaagaaagactaatgattaaatatgaaaggactgcagggaggcctgaaacgtgtcacagaaaaacgtaacggtcaagcacggggggtttgagtcgagaaggatagattacaagggagaatgggggtgtcgcgttgcctgggggggtatcactggaatgaaagacgcaaacggattaggttagggtttcgtgaggtgttctgactggaatgcaacgcaattggggataaattacaacaagaattggattacgagaaaatccaaaaggaaccgggtgggaaatggattaaatatcaatcatggaagcaggtcacaaggggggaagatttcacaagcaagaaagaaagaccttcaggcagaattgtaacaattgacgtcacggtgtcgtggcttctggacttatcgaattttattttgattctgttcgatttttacaggtacggatttgctaccttagaaaagccccctaaaatccttccagtccttggaaaagctttcgatgcctggtccctgaggccatctcggctcttccccctttgagtgcttaacatagtaaggaaaaccgatggatgaggtcatccggtgatgacgaagaactgcaatggttttgaacccccttgcaatatcaagaaaagaacgagacgatcatcgaaccttaacactaccggtcgagtagcgatcagcgccatgaggttcataagtatgtacgatgcggtaacgatggagtcaaccggggccctatcatcgacgttgggtctcgagctaaaactcgaattcaacctttaatcatcctcatgggtgccaagaaccgatggccgcagggctggacctggagagggaacccgacgtggccagacacttccatcgataggggatcatatcttgttttccatgctgcgcgatgattctccgaccacgagcgggctactgactcgtacttgtggctctttgatcgcaattgcacatgcaccagatgttccaaagagggcatcctggaagagtaagtaaatactcgttagtactaaatactaagtggtatatacttaagagtcgtagtcgtgattcgaatgcagtcccttggacgctctccacttggaaccgcggcaacgcatcacaatgacgtcaccaccaggagctcgattccaattcattttcaacaacaaatttctactgagttgcctgataacccttggttgaggcattattattattattacctaattagtctttcttttgttccttctcttccttactcatttaggtacactcccttagggatgagcatggatcctcagaggttactaatctatatacacaaagtagacctagagctgctatagagcttatggttcggatgtgggcctaaggctctgatcccaggcttagcgccctgtatgttcaacatttaagccccaactgtgggggagataagacacaggtaccaaataccaagtagagattgaatctccataatttagatagccacttgagcagccctatctgaagaagatcaaaggctaactttaagaaagcaagccataataggaaggtgagcaccaaaaatatacgcagggagccaaaccgatagtatgtcaagcctttactactatgtaaagcatccatgatctttgtgtggagtacatcggtttggtcccgtggtgggattattgaagaccatgcacctaagccctgtacagaagagtaggtattggttgattgattgggaatatgagagcacacacacccgcatacatgcaagaggtatagataaagcaaaaaatggcgggatggagtgcaggaggtgagggattcatgggagcccggagaagactatacgcttcgcagatccttgatgttgccacataccgcaacagtagaacccctgattctttaattccctgcaggagcccctgacacgcatggtgaagtttactcacgaggatctgctgagtttaacctgctacaccgcgatcattcgcaccgtacagtgactaagtctcttgaaaaaaatggacaaggatgaaagaggaggataaggatcaacatgtcaatcagggtttgtaaactggactcaacaagccagattgtcagggacgcagggctttcaggttaagcaaagagttcaacacgataaatcgaaggtaggaaatcatgattgcgaagccttgccaccaaaactaggaagccaaatgagtaaactgacaaagagcaaaaataggggaaggggaaactttggttggtccttcaccgggcattacgattataatgtcctagagtaaggtcagaatacacagaccccgcgccaggtacaatcgtacatgggccagccatgtaggcaccaggtcccgggagataagcaacagaagtatccatcagttgtttccaaacagatactgagtcctgttgaaaactttcgagaaggtcgttgagttcccacttcatcgcaccaaattgcagcagcttctggatgtgatctaggcactcaatagcacgaccatggcagttgacagtattacaggcctccaacataggcggttttgtaatgtcatggaatacggagggaagcacgggcacggaagggcttagggcgagttcgtaattttgctgtaggatatccacaagtcgccggctaacctgatatattcgtcggatatcaagggaggtcattaaaggtaaccagtttcgtgttcccagaatgtggtgaagttccgcggcgtactgtatgcagcgatcgaaaagtaaaacctttccgtaatcacataatttggagtaatcctgcgagggtgaaagaatcataatcgtggtatacagcagctccgatctgtagagaaccggaaaatagttcggtacattcttaggtgtattatcgaaccaatcccgagctcttgagcacagtacccacgccgactccaaggacaagccatctgtattgaaataccttgtctgataagccgaggataggatctctctaatttcgactattttccacgcaggcttcgagctgtgtaagaagatatgactctttcctgtcatcgcagacccagatgcagatggcagggcgacatttatggaatcatccgagaatgagaaagttctttctaaagcagtgctcacactccttcaccgaaaagtcaactatttgaaggtcatcgagggtattggagaacgaacctgtccatgcagtacacgcagtggaacacacgccggcgcatatccaactgttcatcggccgactgaacctccgaagggggatcctggtgtaggcctaaatccaccaaagccctggcggccattcctacgaggtaccacacacgaaaatgtttagggtcaaagagggaatactgggcaagcagtaggatggcctgaatgcccactatagatccagggcggagaacatcctcggcaaacggcaaagctcccgaaatcaaagataaagctctctgatggctactatccccgctttggtgagatacagatgcagaagctattgctagcaccaaacgaagaaaccaatggtcactaggcttggcaaagcgacctccagcctggtaaacagtatccacggaggtccagaaatttgtctcgctgaagaaaggcatttgagtgaacaaattatcaaagtagtgttgcagaagcggtgtaatctcatgacgtgccggcagtgactgtgaagacgatctcgggataggctcgacgagagagagtgataggagtagatttgcaaatgaagtatcggattggattccatggaagtctctggaggtggcgttcacagatctagtcatgctgtcagcgaatacatttaccggggacccgggccacagacagaaagccaaagtctccaactaggtcgtcaatatcagatatttcttttcggtgagcctgaccgacagtgcctgcagacgacatcgatgttattgagctctcccggacgaagccggttccatcaatggataatgactctttatggcgacggaggtctgcgatttgcctttcgagtctttcgcagtaaccttccaaagaagcaacataactcctctctttccctctagcgaattcatcactcgcacccgaacaagtacttgccttccctacacgttcacatgcggagcaagcaggcagcttcccatcacatttaactttggctgtccgacatcttgaacatgcggccactggccgactgactttgagcagtggcttatccagaaaagaagcactagacgtcatattggtacatattatctaaatgtgttagccatgtctaacacacgagcaagatgatctcaatatgtgcgcgctttggacctggcgtgggtacaggtggaagatggttttacctacatatatcaaaagctaaggacgtcgcaaacagagaaaaatccatacacgggagggtatatcataagttatcttttataaatagataagcacaaccgaatctgccatatgaagatatcagtcaaaacgtccgaaacaaggggggtatagagaatgtaggctagacacagcctatctgatggggaggggagccactgacaagatcaatcaaactagcaagtcggggctagctctaggttttagattgtcaagtcaaatgcttcttaaggttaatggtgcatgctctgagagaaggggggtcaattggggggagcctcaggcgcatccgtaaggcgggtattgtggctaactgaaaataacgtaaggagcagtcacgtaattgatgccaactcctaatacaatacggagtaaagcaagtattactgtacagacttctgaagggcacttggaccttggacggtaagataacagtaagagggtacagtcaagaggcgatcaggcaattccactatcattggcaggaagttctcagatcctcccccccctccaattttcaccccacctttactcttgtgtgcccccccaccgggaccaagcatcaaaaatccacttctcagcttcattcaacatgcctccccctaccaagcataccaaattgcaagggaaaaatatgcaggtactacactctacaagatttcagactcaacgtcttttgcacactctgtttatataaaatcacgcatttcttttgattaccttacatatcaagaagtctaggaattggtaatatcgtaaatctatgaccgttgtaataatgatactacaatcaaatgtgtaaccattaccagcaatcatgagattgtaacggataccgagtttgccatctcaaggctcatagaagataaaagaccctccgacgagtatcagtttaccagcttcatgttttatggatttggctgaatgtgttcgctgccagtaagacaaagatgatactgtaagcattcctcgtgaccagtgtccctccgtttttctttttcttttctttctttttttcttttctccctctctctctttttctttttcttttttgtcttattccttactggtcattctcgcgttccgtagtccgtccttcgatcatttagcgcgtttgtcgatccgagcgggactggaccgaggtttcgcctctcagtccactacctcctagcctcctattaactggcatttttggatttaaaactgaatggactcgacagatcagaacgagagctagccataggaacgacttctgaaccttcggtccctccgaatctcccatgctcttctagtgatacttgtcgcggatgccccctcgcagctaggccacttcggaacggatcctgaatatgtcgaaagccttgttatccccgaccttttgccattgtttcacaaaccttcgcacttcgggattggtctgaattgccttgttgcgtgcacagacttgatctcatgtgatcgcatggaatgttggcttcgatcgtcactactcaatagcaagcaacctctgatcagccgagttggggactgttcggaccgttaccaaccatggcgacacagcttaacccatcctatacaaagccgcagttcacaaatccctggaggagtccctcatcaaagacgtctagtcaatcggatgaaatacctgatgggcgcattgcacacacattgactgcctgtactagatgcagacaagtatgttttaatcggtttctctccttcttatctctaaggtagggacagtcagactgagaccaacgcagcgcaaatctagatgtgatcccgggataccgcgatgctccccctgtgaacgcagcaatgcaaaatgtgtgtacttcgattccgcccgaaagtgtaccataccaaggacatacatcgtttcgctacgtgagaaagcccgtatgttggaaagggagctggaagaggccgagaaggaattccagcatgcagccgatgcagaattaatggttcgcggggctggtcgcattcggtttaaggaaaatgacgatccaagatttttaggaccgtcgagtggcattgcgattactcgcttagttatggagatggccaaacaaaatacagactcaaagagcatcaaggatgttgtacccgaattaacggcacacgaaataaagcaagcgttcgagcaggaaagctcgaagccaacatcaaaagtttatcccatcattagctcaaacccgcagccgagcctcccagcgaagcatgtcacctacagacttattgatgtatttgtggtcaaaggtatcccattgcccgtcaaatttattgttggccttccctacttatcttcccatctaaactgcttgttgcgtgctgacatctcgctagcacaagcgatgctcccaacactgcacgagcctacatttcgccaggatgtcgaagatgttttcaacggttctaacgatccgtgcaagaatttccaactacgaatggtgattgctatcagtatgcaaaagatgagtactgattatgcaggattagccgacggctattaccttgctgcgttaccctttctagaagcctctctgaggcggatggacctcagagctttgcagtgtctagttttgatcggccaatattctttgctaaccccgacaagaaccgccgcgtactgggtcgttgggatagccgtcaaattatgccaagatctgggtctcactgatgaagccacaatcactaagtcgcccagcggcgaactgttcaatcccttggaaatagaaatgcggaggaggctcttttggatcgtcacctccatggaatttgggctatctcatagtcttggacggcccagttgctattctgtcaaccacgaccatatccgtgtcaagttctttgaactgatagatgacaagttcattacaccagacggaatccttccgggagggaaaccaatactacctaagtgtatcgcgatacacttcttcaagatgcgactactacagctggagataagacgaactctctatctcaataagcgcgatgctcctgttgacgatcaagacccatggtttcagcaaatgctcaataaacttgattattgggtagcctcttgtccaaaaaaacacggaggaagtggcttgagtgagaagtggtaagaatactagcctgagtaatttctcgattgtctgtttaccatattacaggtttcatggcaggcggaatactatgattgttttcatgtttcgcccctcccctcaggtaccggagccttctgttagcgctgcgcagaaatgctacgaggcttccgtcttcaatgtggcaatgcaacgagagcaaactgcgaaccaatcggtcgatctaacctggatcttcactcaatccctttttatggcgctgaacactatcctttggtctctgtcataccctgagattcgaagggagcatcccgtagatgaagttaagcgccaccttgacgtagcgttagaggccatcgtggttgctgcagagagatggcccggcgttgcatcggcgttactcctatataagagcttagtcgcggcatgtctcaaagcatacaacactgacgaatcatttgtcgttcaatctccgtccaatcatacaacaccagcatcgtcgcaggaagttgcaacaccaccatccatgtcaagtcctgcaagcaccacaatgtcaatcccttcccggaatatccggggtatgaatgcctcagtccctgacagtttgtcttcgggcacgttgtcaagagggcattctgcagatccgacgttcccattctcaaccacgtcgcctccttcggaaccaataaaagtggctccgtatccgctgtgggatcctcaagtgcagccgcaagagctgacttcctcaagtgtaaccccgaccccatataccacctcatcgttcgatcctacgattgtcgcttgctctgacggacggtttgatccaaccacgccctataaccagtttccttccattgtgcctggtttgcaaggctgggatcctgattttacccttgcctctacgacggcaagccaccttgcgtatgtggaagcgactgttgatccgatgaactggatggactctattggtaatcagtactcgcaatatttcaatggggcataccctatcccatcgtggcgcgagcggacgctcagccaacaagaccagattgagctgatgacgaagttggaagagaacattcctgatgtttctgcccaacttgtgcgggaatctgcaacgttttaccagtcctaataagttggggaagcattggcaactaagttacaatatgtttactactgcgagagtcgtcgagactcgtcgtggttcttctcgtgcagcgacctttgttttgatacatgaatctagatatacccatgggcgattattcaaaaaagggattacgagatacggttggttggtgtttggtgctagttttggctttgatttagtctcacgggtgatatactgtacggatagggaggaactacggtctacagaaccacttttcgatgttgcttcctagacctcaagtctgttcaatatttcctcaacatgggttgaagctatcatggcatgctcaggccaaaataattcatcgtaataacactatggagtacggatagaggaggcgaattggtgaaaggtggatcaccaacggtactaaagcagtggctggggtttcaagaggctgtgacggccttcgttttttagaaccggaaatactcatagtctctcggttttttttttttcttttcttgatattcttttcctttgtttcttatccttcagaataagatattaagtgttaaagggaattaaaactaaagttgagaaggtgaatggcatcaaaagtaatcctggaacattgtactaacaagaaaatccttattggatgcaattcgctgctaacttccttagcggttaatagtaaaatccaattgaatccagaaaatattgaaaggtcgaaatcgtattgacaggtattgtaagttacaagccttgaaaaagggcttggtcacgtgcacttccggtctcttgccgtcatccaacatctcaaagccgtccgtttctcttccagtgcggaccaaagggccatcgctcactccaccatcgccgagtttcgccttccactcttttatattgctcatcgaaacgcttgctcgacaacattctggtagcgctcagaatcagatcattggaatgtgtgcatattagacggctgtggaacgtcctgctcgcccgcctgagcgaccctcgaccggagtgatttcagccccccctcatagcctagatctgctttggtctgcccttgagttgagagtctgtgatatagacctcctcttgaggccgcaggacttagggctgttcaggctctgatcaatctcctttctccgaaccttcacccgggaccccatgtccgatcgcgcctcctcggcgtcattccggttagggcctccttcgccatcctctcccgccgctgggtctctaaaatcgaaccacccttcttatacctcaaccgaacacactccacagaccccgacatctcctccgttgatgtcggtaagcgctcagaactatgcctccaatttcacatcctcgcaaacgtcacctggccaggcaacgtcacaacctgcaaacctctcctcgccaccttcttccgtgccgatgtctactcaagcctcacagcaaccaacagtaggtacaacaaattcgtttccgacaccggctagcagtgtgaacggtcacttcacgggggcaacgcccgtcgatgatagcgaacagacagaaaaatcatttgggccggaaatgggggcgacatccacagcagatatgaatgcgcccattcaacagacagaacacagacggacagatcatgatcggcagtcggaaggaccaagtgcgcaaaccggagtccgcgatttcgggatcacgggcgatcagaatatgttgaaccatggcgatgccatggatatcgacaagggaacggcggatttatctaactatgaatcaagtctagaatctctgcaaaaggagtttacatcggccttccatctttgcaaaagctgtaagagctccccaataccaatccttggtgcggctgttgccgttttcataatgcactctggtccatcatttcttggattgagatatgttaacactgtgctatgaaatctacagcccatattgcgactggtccggacccgtcgtatgatcttgtttccttgtacgggcttggtccggttgcgaaatcggttgcaaggatggatccggtaactggggagaagatcaacagactacgaaagtcctacgaaggcaaactgaaaggccttggcttagctgggagaaacaaacctgtgaagcatgaacccggtatggctggtggattgaggcaaatgacgatgtggccggaagaagagtggcaaaaccagaaggtgttcgggaaagagatcaaggttgctgatatggattcagcgttgcataaccttcagatgagagccatgaaaatggagccgggcacagttacgaacaatgattactgggaagacatccttggtcacgaaaaacagtcgaaacatgccggaagtggggatggtagcaaaaaggctgcgacaccttccaatggcgtacgagtgcccagtcaagcaaatgggacacccaacgcagctgagccggagcggtctcggcccagtcggggacgcaagaggcattacgatgataatagctttgttggctacggcgaaggctacgcagatgacgacgatgatggcgcattctattccaatagcgaagggattagcaagaagaaacggaagaaggtatagcgtttgattctacaatgttttgccttgactaacgctggattgaaggatcatgtgtcgaagatatcaactcctctgcccgaaagaggtggaagttacggggtcggtatgtatggcattggggccaggtaaccgatgcaaatttggcagaccaaaagcaaattgcgctttgccctttttttcttcccttttttttctttttctttttagtatccttgccgtccctttcccccttattccacatctctacgtgcataggtttcaggctcaaaaatgaggactaggctttggatctactagtatgctttggtagatccggtcgccacaacgtcctcaccgatctattattctccgtacatttttgcatcatggtgctggatatacccggctttatcaattgggcggcgttaggggagcaataatcgttcggaacaggtttgtctttcgtatccctggaaggcaaaagattcacagcttaatgttcatgtttaaatgcgtttgcttgttcactatttgatctggtcccgttggatttcgccttgttttattctcgtcctttgcgatggattggatctttttcgattttgtccatcaattacattcaagatggcatgatttgatattcgcttcgtgggtgacagggagtccgactgtatttctttcgtctgtttacttcttcggacagtgaatgtttattagcagtacaggcaagaggcatcaaggatgccgtgatatactactagatgggtaggaatgatacctatgatacagaataagaaatgttgcttacaactgaagtcatccagtagcactgagtagatttagtcatactagacatgttatcaaataatcttaaacccttggtagattcatccgttgccctgctgtcaagcgtcatcattggcgttcttctcttcgcgcaacttgcgctcatctcgactctcactggtcggatcaaagtaagctgacagacctcgaattatcagctcatctatatatctggaataatggatgtctcaatcatatactcacgcttctcaccgaagacggttgtccgaattcctcgcctgttctctttatacctcccggggatcactcgatgaacagtacatctatagccagtagcacaagcatcagaaactggaggaaatataggcttaaagtggcttgaaagcaggagatcagatggaaaaaacagacgacataggaatgcatacctattgtcccacattgcaacactaccaacagcccacttccaacgcacgtagtgatcatcagctgcatggatatgatgcgataggaaatccagaagcttgtctagacagcatattacgtcaatactagttgaccatagaagcagccgccactattccttgagaggcacaggaacactaacccgattccagtttcttgagttctgcaaacccggttacgaacccgttgttcacgttcagggctttcagtccggtgactgggtgcgttcgaacggcgggatggtgggtgtcgatgggtggtctgtttggaccgacgccccagaggtctaggattgtgtcatctgtttggtgtttttgttaggggttttttcgcactgcgtaagggtatggggtgctgacattggagtctggaggtgtgtactgcgtggaggccatcgaggaatttcttgtatgcgtcgctgagagcgtcgtataggccgtattgggagacctgttggtttcctgggttagatgaggttgtctggcttaggttgaaggggcgtagtatatatacccaggctgtatcgcctccgacggctggatgctcttccattctcaggagggaatatgatggcgcttgttgaagtcagtaaatacccgatattatattcattgaatgtgcaagacatacggttaatttcgaatgaggtatctgcgtggaactccccacttggctttaaggagtcgcagttatgatgtgaatgacttgtccatatatatatggagtggtggtcttacccatggggtgtagttggcaatctcgcgatgatcctcacggctgccgtgaatattcacgaactatttaatgtcagtagtagagaaagaacggctatatatcgaggaatatctaactttctgatcctgtatagtcgttagccctaattggagtgttgcgatctagaaactatcttggcactcaccttctgagcaggatgcttatcgagaactcctatataaaccacaaatcagcatcgaggccttcactggttatatccttgcggtgattactaaccataatgctgaaatagctcgacttgcttttccgtcgtcaggtcctgatccctaaaaaataccacacccctctcagtcaccaaaagagccaactcatccagttgctgttcgttcagctgagacagttgcacatcttcgagaagggtaccgattgactcagtcaagtctacgggtttggccacagaaaatagagctttcttttcagggtcggcaaagagtgcccggtctttgggggggtttaagtgttcgcgaatggggtcgggagggacatgctgattgattttggggttgaagttggggtggagagtgatggggaaacctgagtcgggggatatgtgcttgcgcgattcgaggtgagccatgcttagataggaagttgatgtacctgcagtggtttcctgtatggagcactagaggttccagggggggatttatacgtcttattagaatgggtttacttcttgtgtacggcaaagacggatggatgtcaggcagaattactgaatgtgctctcaacagccaatcgctttatatctttgattgactgcgtttatcattcgaaatatggtagcaatatcaacatgcaatgacacaattgacagatgccactagttgcataaatggtctggatggcgtcaatgctgccgaccatgacatgagccctaacaatcattggttcgtatatgtagctttgcagaacagaaacgcgctatgaaaacaatgtctgaaatccaaaatgtcagttccatccgacatttattcccaaattcggaaatcctttctgataaacctgaatctctcagtatctatcgcaatgataccataaggccttgggatcactctatcgttcccccattcagcccccgcaattggcgaggggttgttgctacccatgagtctagactcttattttattcatatatagtttctaaatacatcctggtactcggctttgcttatgcgaagccctaacttacctgatctggtttgtacctggagggtaagaaagtaccacaagatgggcggatcaaagacactcgcccatgatacaacccaagaatggtccgaggatgagaatgctgttcttggaggtcatgatggactatggatccgttttctgacatgggcacggtggtatccgaaagacatgaatcatttggaaaagcgattggtcttgaaattggacgttctgattctgacattcggctgtctttcattcttcacaaaataccttgaccagcaggctattacgaatgcttatgtatcgtaggttcactccactggattgctctcatacaaaacggcagatactaacagcaatacacagaggaatgaaagaagacattggactcgtcggtaacgagctcaattatatcacagcagcattctgggcagcatattgcacatctatgatccctgcatgctactatctgacccgaagtcgaatcaatatcattttacctacgttggaagccggttggggcctattcacgtttgggtgtgcctgggcgcagaacccaggcactatctacgcgatgcgggttctcatcggcatctgcgaatcgtgctcctttaccggcgtgatatatgtcattgggtcatggtacaagccagaagaaatcggtcgtcgaatatctctgttcttcatcgcatcgcctttggggaccatgttcgctggttatcttcaggcggcggcatatacaaatctgaataatacgcatggattggccgggtggaggtatccatctctgaaatacttgtacgaggatgactatcagctaataagctttacaggtggcttttcatcgtttgcaccatcatcacaatacccatatgtatcctgtatgcccggactcaccacctccgatacagggacattactgactggagacagaggatatatagcattcctggacgttccgcatcgcacaaaaccccggtttctaactcataaagagcacgaacttgccaattcccgcctcgttggcctcacagctccaagccaattgaaagtctcccgcgacatattcaagcgcgttctcggccgttggcattggtacgtcttcgttgcgcagtggatcctcgttgaccagaactttctggcttcgtccacaccgttcagtttgtacctcaaagcaaagccgggcatctactctatcacgagaattaatacactcccgacaatcgccacagctgtttctattgtagctgccttgatcgcggggaccacggcggacaggaagagaaatttctggctcccttctatcatcactacaattccagtcctgttgggccttgtgttgcttgtagtttggaatgtaggtgaggctggacgattagcggggtttattcttaccggagctgagggtggtaagtgacaaactcccttgcatatatatgttcatccttctatcttcatccatccatcactgtgacattgccctaacgaagccaattatctagcaatgagccctctcacaatgagctgggcaaccgtaacgatggccaacgatgccgaagagcgtgcaatcgtgacggctagcatgaacgctatcggtcaagccatgtccgcttggacgcaattactgcaatacccggcagcggaagccccgaacttcaggggaggttttatctcgaatctggcaactaccgtggcgcagttggcggttgttgcgattatggttttgctcactcgttgggatgcccgaaagacgagcgggtcaaatgtgtcggcaatatagttatgaagatgacagctgttatgtacaatgctggacctgtaatagattttagaagtttcaaaaaggctgtttcagagccattcatgttagttggtggacataccataaggtagaatattattgtatggttactgccttggcttattgtagaaaaccgtcctacttcctgagttccgacctggtgcttttgttctggcagttctgtagatacaactatacggtgtacgaagctgaaccatttactgctggactattcctcaagtcgttgagtgaacacccaccggatatggaactgccttggtggacggatagtgaagacacagttgactaaaatgattaaatccagaacctttgaagtaggcgcaagggcactctatcagcccagagtatccagagcctagtggtgaaccaatatctgtcgggagctcaacggccttcctaaaagggacaaagattgagtgtctaacttacacccaaatttaggaagaacccgtatattccaaagagctcttagatgttatatcacacaagtccatctatagataacaaatcaaagtcaaagaaaagttcaatgtcaaattactaccccgatatatactcctcactaacagatgatccgagatcttgattggtatcttcgtccttgcaacatcggtcccggcagagttacagcaatctcaacatgaagaaaattcaatgccatggaaagccttatgaggtgaacctttttgtgtttcctttctagccttgctcaccctatgatttgaattcatagcaactggtaacagattgggaaggcacatggagtggaagcgcaagaaccgatccgtcgcagtatctcgttctatcagaagatgtttgttcatacttgcaagctggaatggaacgctgttcgtgaaatagccaaggactggcagagtgagattgagcaaaagtggccaagatactaccatgagatacaaggtaagtcagacggcatgtcctcgtgttggtctcgaggcgttctttgttgtttcatgtcgcttatatattagaaacaatgaaggaatctctgatggtgctgggttgcccttcgttgacatattggctctcaatattcgaaccgagatcgcattcggaatgttcaacgatggctgcacaagcctatattggaaaactcagagcaattcctttttggcttagaattgggacgtaagtcaataagtgtggataaggaccttgggacagaggtcggtaacagacctagtaagtcaacttgtactggaatgttgagtctctccagggtatccttaggaccaagaccagacaacaagagaattctaggagatccaaacgtgccagcacacaggacagtctgctcacggcagtagacatggacttctcacatcaatcagcctttcccacgtcatttatgagttgtgagggtcattttggcactcacacagtgctccagtcagtctgtcatacaactctaccccagtgacaactccgtctctaaagtgaactcggtcgcactccgtatttgtcacgattatcaaattctttcgcgatgcccgagctgactctcctaggaaagcattcgccgcataagatctctccccattccgaacgttaaattgggctagccaacgcccactgggtttcccgaattgatatctgggcacaatggaatgcctgtttcaaaacatgcttgaatgaagggttcgattctaggaaccacttcgtcgccaaacccgatcttaagcggcctatggtgattatattagaatacctcaaaggtatggacatgggaattttaagctcacccaaaaactccatgatcttcagctcgtggagcagcaaatctttccaaataggcaggtaatttcggatcgaaatccttaagctgtcatcaccgatcaacacatttccccggcaagctttttcaagtggaaatacggacctgcttcatcagggggaatatgttttcccacttccacccgtcatcgccaaccatcttggcccattcatcataatcagccgccgggcctcgagcaagcgccatataattgacagccctgaattcaaatcgttaattcttctatcgcaatagctcatcaatcggaaggtactcacgaactccctccaatctgcttccctctaaggaagaccagttttctggcgtttagttggggctgcgggatagtctccagttctcataaaccatctttgtcttgtagctgcttgacatatttgcctggcactagaacatcgggtgcaaggcctgaatctctgcccgcttctatcagcagtacagatacatctggaatcgacgcaagacccgctgcaatgacgcatccagaggtacctccaccacacacgatgtagtcaaatgtttggccagaaatggctgtggcgcttaaggtctgtttgggctgcatcttcgagtcgaggaacacttgatgatttgaaaaagatttggggagaaacattacatcgaagacagatattctagatttaaggagagcttcaagagctattaattgtggataggtttctcgtggagctcagtatctcagctgatttccgtaataggaagttcgatgagtgctcggttggactcggtgtgcttacattattaaaaactaagaataattaaatattttataagattaaataaaaagcagacttttctatatttctgaaggttctgcttacagtgctttagtcaaagtctaaaaaagtaaaaattggtttagttacaagcctttaaaatctatatctatatagattaatacacatgacgtatacacgcgcaaaaccgaaaaaaggtgccaagaactgaaggcaattttgcatactacaataaataaatagtggagaagggccatcattcttcgaccaattgttgaagttcaattgaatgtcattagaagggcgcggatttaggtagtacccacagtgacctcaaaaggacaatgttgtctactctagcacctcctcgagttcttgtcaataattaccccttgtttttatatataattccttcgtctataattcattctttacgtctgttcttgtcattctaatagaaaaaaagactatgtgcgatactcaccccacgcagcggaagccatggatcgagactccgttgatagagtctgcgacgctttcaaaggcagcaggatggtgagtatattttattaccggcttacgtactattactaaattctacgcagtagagtctttctgaagctggaactgcttcaaccctcagggtccttcaagtcgaggtagatcgtccaaaacttactcaagaactatcaagaagcacgaatgtaacttatattcattgcagaggtatcggaaatctcattcgcagcactctcctggaccctgcaaacaaagacaaggaacttcatttttacagttcttccgggggaaatgcagggctcgccgccgtcatcgcagcccgagacctgggctgctcctgtacagtcgtcgtaccacatagcaccaaacctctcatgattagcaaactacgtgctgccggagctacagatgtgatacagcatggatcaagctggtttgaagccgacacttatcttcggcaaaacttcatcgaaaataacacaaacgagaagggcgctgatacagccatgaaacggaacatctatgtgcccccattcgatcatccagatatctggaaaggcgctgggacaatggtttcggagattgctgcccaattaccacctagagacactcctgcgggctacgctttccccgctgatgcgattatatgtagcgttggtggcggaggtctctttaatgggattgtggaaggacttggtgattacatgcgatctcatccgacaccagacttaataactggtacgacgttgaagaacgtccgtgtgttggctgctgagacgaatggagcggattctctcgccctctcgctgcggagcggaagcctacagtctctaccggcgatcacctccctggcgacttctttgggtgcgctttgtgtgtctcctcagactttgaaggatgctcagtcaccaccggccggtgttgacgttgtcagtgttgttgggtctgacgctgaggctgcgaagggagtcattcacttggctgatgaccttcggttgcaagtggagctggcatgcgggatcagtgttgacatagcagcagggccgaggttaagggaagctgttccagatcttactccggacagtcgtgtggttgtggttgtttgtggaggaagtaatattaccgcggagatgattgctgagtatcggcagagattgcagaatggatgggagtagacattatcggttcttcctcctcggtaatattgcgtaatacgaaattgcagtatctattcttttgaagatatgtgtataacatgatgaagtctttaggtgtgcttaacattgtcgccggcattggacttgcatgccaaaattagtactgatatcgcgtgacctagccttcctttcttttgctactactaacaccgatgctatttacaactagacctaaaatcaagacttcttaaagattatagactcttctgttctgcaattcacttgcctgcaacaagctaccagtggccttgtcccatgtccccaatgcgagacctgtgacatcaattatattcacccggtttcattcaccagtttactcgataacgctgaaaatgacaccagcatcacaatctctcgcctgaggcaacagctatggggattcactctcagtgttagcttttgttacaccctcctcaattcactcgcagtcacttgcatgtagacaacatcctgcatttgctttccttaatgtttatctcaaaccatgtttcatatctcgcttcttgttttatccatcgtaccttcatagtcacttcttccttctttctcctcataattttcgtccaaacgccaccctcattgataagatggatgatcaagttatccaatttgctgaacagcattacatagcagagcagacagcacgacatattcgcatctggggaaaccaagatcaacgtaagtttttctgtctgaaatgatacaataagagagtcatcttcacgccagccttgctagtccctccctgccctaatttcaaagaaatctggtcgtctatagcaccaacacttcgtcagccatacgtagagcgcgttcgagccctcgcttcatcagcgacgccgactggagcacaggctcagtatagagacatcttgaagacattgtatgaaaaatgttatgcggagatgactcagtctgttgctgaggagacatggtttgttcctcgtaagtactccctgtgtttgtgtatcgagtggcttctaacaactccaagtaagtcaatttgagcagagtatcggtcaactagggacacgtgtcttgtctgaatcataccagtctctagatatccaggatgatgaaaatagcgacgatgaccggactgtatgctctcaagatgaggatatggatatggctgatacaagtatccccatggagtatgatccaaggaaatatgaggatcccaagatctctacgttggaaactgctctcaaagaaggattgcttgccttgaataagctacaacaggcttttgaagggtcagatgtccggaacgccgacatcgactggaaaccacaaatcgaaagaacgctttcgatttcgcagactgaaaaggtgattattggattaaacggaagcaccggcgccggtaagtcttcgcttatcaacgccattgtcgatgaagagaacatcgtcgcgacaaattgcatgcgcgcttccacagcggtagcaacggaattgttatacaatgatggggaatcacggtataaggcgcaaattgaattcattgaactcagagattgggagcaagaattgcgtattctgtttgaagatcttctcgacagtcacgaggacgtgatccgaggggacctgcagaaaaactccgatgctgcggtagctcttgataaaatcaaagccgtatatccactactggaagtgaaagacatcctgaacacttcagttgaagcgcttatggagcattcaaatgtctcagatctgcttgggagtgtccatgtcttcgaacaaaacgaccccaaggttttttcacggatggtcaagtcctacatagacagcagggggagaaggggcaggtctgagaagggcccggagaaaggccgggatatgaagtactggccgctaattcgcgtggtccgaatttttcttaaggccccggcgctgattacaggcgctgtcttggtcgatttgcctggccttcacgatacaaatgctgcacgtgtggaagtagcaaaggagtactcgaagcgttgctctgcccattggattatcactccaatcaatcgcgccgttgacgacaaagttgcacgcgatctcctagggcagagtttcataatgcaaatgcaaatggactgcagcttcaacaacattaccttcgtctgcaccaagacagatcatattaccgtcagtgaggttcaggactctttgaaactcagactaccgtcaatgcaagagcgcgagcaacgagatcgaaaacgtgcgcaacttggtgctgaactgaaactgctccaagaagggaaggggcgtgttatggaggagttgagcttacttgatgatgagatcgaggaacttgagtcttgtttgttcaacgaagaaagttctttgaacctgtctcaactaacccccataaaaagaaaaagacatagtgatcttgaaatggacgtcaccgccaatcctaacgcagaagtcccaagcacgcccattctgcatgtctccgccacagatacgcagccctcggcagattctgaaattgatgagctactaaggaagtttcggtctctcaaatctgagcggaaggtattggatacccaacgacgagaaatctaccagcagatccaaatcaacaaagcagcattgaagcgagtacaggcagaatctgataatatgagggcggatactcttagtgagtgcatcgaggccaggaatgagtattcaaaacatgagattaaaagagattatgcaaatggcattcgtgatctggacgaggaggatcaggatacattggcccccagtgacaggtctaagctggcccgaaactacaagaaaatagaagatgaactccctgtgttcactgcatccgctagagcttaccagaaacttcgtggtaggctccggaaggaaagcgctgtagccgggttcacacagctagagcagactgaaattcctcagttacagcgtcattgcattagcttaacagaaagggcaagagaggcttctgcgatgcgatttttgacccagctcaagcaattgttccaatcgatatctctttggtcactggaaactggccaggcgcatatcatgtccgccgaggagatccaagaattagaagccgagttcaactccactatggtagaattgaaagaggtatacacatttattgaggtgcatcagcaacattgactaactgccttagacaatggtggccgaagttgagaagcatatcgattcccttcggcatgaattcgaaaaaaccatcataagaagattcggtacattctttttcagtaatgcacctgacaggcattaatattgtagacccagcagtgaaacatgccagtgagaaaatccctggcatcatctccggctggaatgcaccccgcagcgaaggagggttgcatatccaaacttacagagctacttgccgtcgccggggaatgtttcgcgaattggactggaaccagcaactgtaagtgatgcaccaccatgcagtcgcgggcacgaatacctctaacacaatagcagagtcaaccctttattgaaaagagtcatacaaggctggacaaccatgttcaatgaaaaggtaccaggacatttctttcagttgaagggagatttagcagaaatcttggagcaatatcacagaagggcaatcgctctagtagaaagaagaagtgtcaccaaggaaagcaaagatatgctagacaaagcactaagcatctgttgtaagtctatgggagaacagctcgggagtctcgagcaatcgatgatctcgaaacaaaaagaaatcaatcgaatgtttgcagaaaccatcagaacaaagttgatgccgacttatgaagagtgtgcagagcagaaaggtgagtcgttgcagttcctctctcataaaggagtaataaatggaaagaaaagttccctttcacttttcttaagtccaacaatacatcgaatactttcttctgaccttattccacaggtcctggcaccctcgcccgtgagaaatctgatgactcaggagggcgcgaggaacagtgtcaacatgctacagacaagtgctagacgagtaacaaagggactgacaagccttctggagtcgacaggagcagatattgaagccctgatcgacacgacagtggaccaggtgtcgcgcgactaccgcatcgccataatcgatcctcgggtccgcaagctctctcagcaacaaattgagctcaagaacaaaatcaccaatatcattcaaactgcagaaacagaggtacacttggaccagcaccttggactaagtaatcatcaagaattatctgcagagatcttaaagcacgagggagtggcgaacattaaggaggagaatatgcaggcatgatgttcggttatgattctctgtctaagatgccagtgctaggagcagagcggacatcaagaccaaagggagcaatcatacatggaatacaagctatgatagatgtcttttcgagatgaacattgacttgatgcctctggagtacgaaatggtgttcgcggtcgggatgatggtgtttttgtcttaagacttttcgatgcgaacttcgcatgatctgggacttcatgtttctgggatttttggaacactaaaggcggatggttgaagcttgacccgatgttactgggagacacgagatgaggtgcgaaattggattgatggtgctgttgtttctggatctttcagtacagaacttaaatgatttgatatcacaggttcgtggaggatgatacatggctgttgttagcggcttttggaacatctcttccctgatttgaataggattattctggaaatagacctttcatttcgtcttctattgcatccatcttctgacgtgattactggctatgttcctggaacagtagaacaataaacatctaaccacacccatagatatcaaaaataaacacattctacgaagcgaaccatatataataaatcatcaacatatccattgatctcatcagctacccgataatggccaagccactggtatttcgcaaataaatctcaacataaacatggcagcatcgcagatcacacgcaaatgagtaaatagtatcaatagggagcaagcataagacccaagagtatataacgccagaatgtagccactaggatgttcactgtttgtcttccatattcaacacatccctgcttacagatcgcaggggggtggtctttggaaaagcagaaggagaaacgaaaaaataaaggaaaatggaggaagagaaaagtcacaaataaaacaagcgtcccatctatgctaggttgggaatgaataaaaaaaagggggtgaaactggaaaagaagataaatggtaaataaacaaggcaaagcatcaagtctatcgcatcgtgcttaacagtctgaaatcatgcaatgcaccgggggaatatcaaagaccgcgtatagatgagacagcgtaggatggattgatcggcgaaaggtaggaaaagagaaaagggtgaagaacgagacctttccccagataaatgcagccacagacaagacttgtcagtcattaaagatttcttttttcggttccgtccttctggtttcctttcaagatttatatgttctgttatccctgtcgcgttgaatacgtgccgtccgtggattagaaggggaatccgccagggaatccgccgcgggactggccgccgccgaaggggtttccgccggcctgggcgaatccaccgccaccgccgccgttcatcatgttaaagaggattttggggtcgatgttgatatgggtgccgcccatgccacccataccacccataccgcccattccacccatgcctcccatgcctcccatgccgccgaagccgctgaagccaccatggccaccgaacatgtcggatgggtcaatgaggtcatcaccattgtcataagaagcacgtttcctaaaacctttgttagacagccagtattggaaaggaccaaagacagaggggcacatactgaggatcgatcagggtctcataagcctctccgatctccttgaacttctcatcaccttgaggatcatcacggttcttatccgggtggtactggatggccagcttgcggtaggccttcttgatctcatgctcggaagcatccttagacacacccaagatcttgtagtagtccttccgctgggccttcttgagctcaaattcagccttgcgaatctcttcctggatacccttttcggtggggttggactccgccacggccttgtaatcgcgcactgcttcttcccagttaccagcagcaccgtgggccttagcacgaatcttctgtgccttgacatacgacggatccaaccgcagagcctcggtgcagtctttgactgcgttatcgtattccttcaggttaatgtgtgcctgagcacgattctgtaagatctttgcgttcatgtccttgttggacgggtctacctccaaagcttgcgaccagaggtcgatagccttacggtaatccttggccttgaaagcattgttgccctcttccttcgtgcgcatcaacttctgaacggtacgaagtagtttaatagccgacttcatatcaggatccaaactgatacagattttaagggtcttcagcgcctgttccgtctctccgaggccgtagaatgcacgggcacggatcataagagcgtcaggatcttgattgttctgtcgaagcatgttcatcgcaatatcctgtgcctttgcatacgaattctcgtttgccatcttcagctgtgcttccgcggtaatcaaggtccacttgcggggctccttaacgccatttcccaggagcgctctcgcctggtctagacagaacagagccatcgacaccccccgttcctgagccagggtctcttccgcttgggtcacgaaacgaatcatcttctcagcaggtgcacggtcggtcgccgaggcgggagggtccgtgcgagagaggacattaagggcctcttgcgggcggcccagactagtgaggatacgggccagacggtactgaatcttagcgttggacggatcgagctcaagagctcgttcgcagtcttcaagagcattgatatattgatgggcggccatgtgtgccgccgcccggttggacaggtacacggaagaattagggttaatctcaacggctaaaagtttgtcagcagaagcacgcatgagactgtcgcagcagagcgcctacctttgctgaactcttcaatagcccgagcataattgcgatccttgaagaatttatttcccgccaacttgaatgaatccgcctcagcggtcgttccatttgatctatgaggaggaggggtagggctcttttcggcatgtgttccgttcacaccattagcggacgacgacagacgagggtcattgctgtcgacgtccatcgagctccggtcagcagcagcggccatggctgatagacgacgtagttcgtcaggaggaagatttaacggatgaagatcggggtcgtgcttcttgaaccggtgaacggtcgaagcacgggagaaggtaggacgagaggcggaggaagagaaactgcccttagaggtagcagaggaatgtgtcggacggtgacaggatttggagtgagaaggaatggacgacgaccgactgtgggccggacgagtcgaggatttgcgtggaagattcggctgaggaggaggagcagtcgccgcagcagtgggttggtacggtggaggtggagggggtggaggatttttccgggtactctgagaatgacggggagaagaagaggttgaaggcgacgacggaggaaatctaggaggtggcggaggaggaggagaagaagcagaagggaccggcgtcggatttggagtcaaagtcgagagatccggatgctgaatttgcttggatttggatctcttggatttgtgacgagagaaaagttgcggaagaaccatcgctctgattggtcgtggccgatcgaattgcaacgaaggcggtggaagttcagagtttgatatcaattctttttttctctttttcttttttccctctatttccgggcggaagaaacagatgggaaaaaataattaaataaaagtatatcaaacgacaacgattcaaatagatttcggtcgcaaaaagattcacaagagaaagatcaatactcgctgaatcacaacagatcttttttttttttacaaagaaatcaacccaggtctagacaaagagatcggtcatgatgacaatggcgcagtcataatatagttgttgttgtctcgtcggatagtcggcgtggagtgaaatcgtcgagggttcaacttgacaatagtcgaggagttgaagagaagaagaagaagaaggaaaaggtgcgaaaagcgaggctggcgatcgcttgagtgatcaattcaaactatataggtaataatatcttttccttagtgtagacttatttatttggggatttgtctccctccacttgggaaaaaaaatcatggaggctggtgatttgaaggtgacgaactccgcctagcgtgcagcttgtcgtcgaatcccatcgatctttcgtctgtcgaagagaaacgtctcactactgcgtcgccagtaacggccactcctcttcactccaggccagtcaattctttacgatcttctctccggcaggcactacaaaagataaatgaccatctcatggctacctaatccaacaaaaacgaaaccagagcgagggaagaatgactacccccccgagccgccaacaactaggatcagatccactccgccaatccgtacgccagaaaccaattataacaccaaatcctatgcatgacgctttgtcgtttccatagcaaactatcttccctatcctcagtacggtttttttttttttttttttttttttttacacaagtaccgccgacttcttccccgatcagccgtgccagccaatgcggcccaccccctcggacttctagtgttgcctctcttgttactcgtctcgctttaacatgaggtccacttctccggcgccttctgacgttgcaggcaaatttccaagcgactcgccgccttttccctgtctcgtccgttggtcatgttgcagatccgcctctttggttcccaatcttctacctgttggacagagaactggcgggccggaacgcaatgatcgccacgtggtagtcgcgtgccatctggtccaccgtcgactcacttgttcgccagtaaagcccccgaacaggtacaaatggggaagtgcggtcgattatagtacaagtgtggtatatacaatggtccgtaaacttcatcttggcacaacgggccattttcgtcacagtcgtggtcgggcggtcgccgtccgcttatacgattcactctgcctcttaagtgtgacaggagctatcttcatgtggttcaagaaggtagggacgaagatatttgtcgctagcgaagctccttttcgagccaaatcaggtcgaatcactagtatcattgactagcgcgaatgcgtgatcaatatacctgataccaacgcaaatcctgtctttccgactaccaaagccatgcttcgcagggtttgggaattgcaactgactgacgctcgttgatataagccataatgcgatgaggacaccggtggctagactttgaaacacttgttagactgtatataatgcttctcagttgccaaaagggactcggtgtgccctcctccccgcaacagccgtccacacagaatcatgcgcgcccgtttgcgacaaaggctgcccctgattcacccgcggcgacaatattggctgatcaaatacatgctgttcatatggaggtggaggagaggtgggtatgtctgcatcccgctcgccattattcgtaaagtaggtgtccatcgagcgagagtgagtcagtgttggcacttgcgcagggaaattcgttgagacggtgatatctgctcgcacccagatattttgttcctcaagccagataagttggtgggatggcgaggcgctttgcgcacgaaaaggtctttctcctctaggacgcgggttgaataagcccagaggagaggagtgacctggatgagagatggggcgtcgcgcagcggagtaatcgactcttcgttcagagggaacatggcgaacgccatttccgggggtcaaatttcctggatgttgcatgcctcgttcacggcgatgccagttcacgccagatgctatactaggcgacttctgtcgggacgacggcaccgggtcagcggatgctggccgtggaggatgggttggcaggccatcgaatgcttccagtggtaacgctgaatagtctaactgtatgctggggacacccgagtaaggattcgtggaatggggccgatgaataacaggcgggccttccaaggacgacaggtctattgggttcatctggacggcgatggtgagtacaagccgatgtcgatctggggaacggtcacaggcaaaaagaagcgaaatgattgaggagtaagggccggccgctttcgtaactatattattatactagatcataccagggcccatgcctaggaacaagtggcacggccgggtacgaagtcgtggaggcaagattccaaaaaaagcgatgaatacgatgattaacgaaagggccaagtggatcgccacacaaaatgcgtatttggcaacaaaagatgcctagagagcatttaagttcaatcaagcaaacccccgcgagataggttgcccgattcaacttatatgatcacacatggtcaaacgtcggacaatgcgttgaggcggtgctcggtgcagcttcgagtcctttgtgtgccgcgtccaacagagagaacagcacaacaaaaccaacacttctgcgccgccccatgcatcaaggatccataagtggattcagccctctcttcggggatctggtgatagatcatgggggccctaagactaaaggcaccctagatgccggactctccatctcggaacttctattctagtcgatcaaacatgtcagagtgggaaaagtaaagttgacaccgcagaaggcgtcccctgcacattgaatatgccctgcaggattctacaaaatacccaaactgattagtacgacggataggaatttggggtcgagtttcatgaactgttggggcggccgacgcaagcacaggcgataattcggtatacttcggcaagtaaacaaaaggcactggccagtaagaatgattccaaaataaatggatcaaagtcagtccctggaaaatcgtgggaattggatccggtagggttcagttatcgccaccacgtccctttttgccgcgccgagcaaagaaaatcacctccaagaggggggaaagggtccaagtgggaacatcccataacctggagaaaattgggtgggaattagcttcgttcactcggtcagcaggagagggaagagcaaagccttggggagaacaaaaacatcaacactgccactggccgccctttgtcatcgcctcgtcatccatggttcgctaatggattaccgcagatattacttagaataatttcactagttcttccgtccctctctcgtcccctctttattaatttatttcgtgtctgccacggagtatgattattatgattagttgtctgcatcgattagatcttaaccgaactcgatagattgcatatctgcgcttttataccgacaagatagcgcattcccatatcgtccactaatcggggcactaaagttctctaaatcgggcagtgtacttgtaacaggaagtccttagcgaggccacgaagatcattctggattaccttcctatgccttctagaaaatacacagtacgttgccggcagtacaaattgtgttgaggtatatccaaacagactcgatacctttattcgacgggcacgtagttttctttttcccttcctttgttttccctcccgccttggcccgtaaggctggcggttacacggcataagtctgtacaataagcacctggaacaaggtatgttatgttagttatccatgtatggatcactaatcctggtctggtattgtcactagtagttgacctcggacgagtgggaaccggagtacgcgtcgattcgacttcctcacttggccctttcatcgcgcaatgatgttgccttgcattggtgcgtttgatgaatattagactccatgcatatggacatgggtatgtaacattaaacaatgatgtctaaatatacattttttttttactttctttctttttctttttgactctcattgtttcagaaaatatcggaattgatctatcgtgagttatcgagtactgacaaacactatttcgcccacaatatactagtaaatgcttcgtaaaaacacctcaatcccacgaaacttaggtacctaaatacaattcctcaaataggtaatactaatccattccatcccgtgtgaacctcccacagaccatcacaccattcacaccacccataaacatccccaaatacctccccaaatacctccccaagtactgtaccttcccgattccaccccaaaaaccacaatctatgacatccaagtcaagttcccacataatcatcaaactgaaactcgcctcccagatccgaatctcatccttggtaaattccgatctacgacgagcgggtctcttttcatgcgatcagacgcggcgggtgggaggctgattggggggctgaatctggggaagagttggttttcgagatggatcatgggtcgggtttggggtatgtattcttttactattctttttgtggtttgtgtgggatcacaattatgtgtatggagtaggatggagggtgttgagtatccttctcctgtgaactaggtatattgtatgttttgtactatagtggttgcgctgggctactagatttggctactaggtaattgggatacttagattgataaaggtgaaagcgtcatggtttacattaaatcgtaaacagcgaccaaactgcttcacaacttcgaagcaatccagaagccaaaccaagaagtataatcaaggaaaaaaaagaggtataaagagtatgtagtcaaatatgaagcataagaagtcaaatggtattaactctccccaaaaccacacaaaagctaaagacaaaccccgtccaactctggtatcattcacacagaacgtccattactagattcccccgcctgcagcggagccggactcacgagtgaatcggggctacactattgacaagaagggaatttaggccaggaagaaagcggcggcggcggcggcaccggcaaggccgaaggactggccgacggtgttggcagcaccggtgaagagagaggtggggccggaggaagaggggctgggatcgttgttagtctttatttggctttcctcatgtttggaggttggagaaacttacgtagcgctgccgctaggggcaggggtaccgatcacagcgacggaagagctcttgccaggggagacaccggtgggggtgccaacggggccggtgatggtcgagtaggtgacggtggggatgcaggtggtcacagcgatgacagtggtgccctggctaggctgcttaggaggctgagggatgacggggctgctgctggagggaacagggggaacaccgctgctgggaactccagggataacaggagagctgctggtagggacagcgggggggacctcagcagaggaggtctcggcaacaggaggaacctcagcagaggaggtctgagcaatgggagtctcagtgacagcggggccagtggtgacaggctcaacaccctcaggagtggaggtctgacggccggggcagtcggtgacggtgggagcgcaagaggtgatggtcacatcctcggtctggtagacggtgtggacctcgccgttggggatggcggcagcaaggccggcgaagagagcaatggtggtggcagagaaacgcattttgactgtaggatgtgtttttttcacgagataatataaccgtcaaggttgatttatttggtgttgtttagcggttggctaaaagagagcgtgggtagttggtttggtaaaagaatggctgaccgaagtcaaaaagttggtatgcttcaagcaggaagtttggacttaagagaaggaacggattgaaacaaacgaacgaaaggacgggggagtctggaggctttgtatgaaccgggagattaacctggagatcgtcccagggacgaaaaggagagaggggactgcaggcgggtggagagggctgcagatactggctttgctagactctgagtctatcaattggtgaactgtaatgcggtgtgtttctccaggagaaacaagacaacctcgactaaacccaataggtgggcgcttcatcaactgaatggggccgccatcctcatggggctcgtgggatggcggcttgaagcgtcatggttggcggatgtgaccgtcgcgaagaacgactaccggcgaactaatttactagtttcctggttagcttcgctgccacagctggtcccagtcaatgcttactccgtacactgcttgagcgcgcgctgatgatctgtcggtcactttcttgattcagttataatcacgaatggcaaaggatcatcatagactattttcttcactataaaccccgagtatttttatcccagacgcattgtactaggcagcagagcataatagaatactattccaaaattgatgttgctgtaactcacaattgtcattgtaacatccactacgagtggcatgaaacaaaaaaaaaaaaatccccgtccggaaattagccctgcgcccaaacaatcattgagtgatacatcgatgtatcctggggcaatttcaggggaaagtgtttttcatcggccaagccacaaggacgttgagcaactcccgatagatgtttcaggttttcgggtcaagccaatcagggtcataaacacagatccgttcctgacgccatgctccactcattgaagtcgccaacagcccgctgtggctcttgggctccacccatgggccaatggcttgaatccccaattcagccccactaacccctgtctctctgctaccattactatctccattatttttctcaatgcgaggagagttgctacagaattgatcgatttttgagtccaacagaattttctccttccttttgtaaaaccagagagtacggaagggatctgtatccattattcatcaaagtcacaagactcggaaatgtggttcaaatcaattttttagtatctttggacccaatggtgctctgcgtcattcggtttccttatgatagtactagtcggacgtgtgactgcgtgtacatacggagtacaaagtgctgacggccggttccgtaggtaatcctcattttcatgaataacacacttgtaaaatctccgaacaggggcctgacatccattgttcgcgccacacgatcgtgtttctccgagtagaagctcttcaactcatccctgtccctgtcgtcggtctagaaacgcagccgatgtatctaatcagccctgctaattacgtgaaggaagcttggctgattttgcttgactcgacaagactagggctcgactagaccctggtcagtgtcattaattgcttattaaacgctaagactgccaaggaaggaagaagagcgttgtactccggagtacaattgtagtattcgtttacaaccctggtcgggtctagcctggctagtcgatatttgcgtggtatagtgtcagtcatagcgaataatagaaacgtttttgtaaagtgccgactccattgatcgtggttagccaggatcctgtgtgctcacgcgagaaaccattcggtctgccctcggtacctagattcggagtggttgcgccatcaaaacctagacatgagctatgtaaagtcttccaggcctgaagacgctgagacatcattgtccatgaggaatgaagtctggtagagttatcaaactattgaaaaatctatcgcaccctgaaccttctccggaatattctgtggggacaagtcacccagagagttcgtgagcttctttttttaggactcttgtctaccggataattgataaagaaaggggtgttcatctttccgcagagagtgtccacacttcagggggacctgcttggatttaggatcggggatagataggaccgggtaaatgattgattgatggttaatccctcaacgaaatctggatattatctggcatgatcccgttgcgaccaggtggccgagtagagtcccaaccctcaaagactacgcagcattagactctatggatgggtttggagaaaacatattggtgcgttcggccgttcgcataatataatgctgttaattgggttcagggctccaccgatcaacaggggaaaggctcgatgattcacggcagtccgcactctcgatatgcgccttctaccccggtggacggacgtacacagttcggacaaccatggcttccaaggcgttaccccggttttcaagttgagggtctcatgtctagtagtctcgtccttcgacctgaaaggtacgtggaacatgacgagcagatctgaacaaatattatgtaccatattggaacgcccatagtcagtgcccgagacaatgcgcacagagaaacgcacgaacagacagcggtgctaagtcggtgcccgagtcaccgtttcccgctcattgttttcatcatcgcaggaaactggttgatccagtggggtttgcttgttgaagatcgtccatcgccacgcgtctaccaagaggggttcttttgctctccagtctgtacgcatttttcatgtgtgtgcctgtcgtaatcatgatgtcttctatctaacgatgtgtgatgataattgactccaacagacgtatagtgattcgggtaagagattagagacgacgatactcgtagtaaattccgcctagaagcatcgagttagtgcgtgaattgctcaagcgacgcaacatatgagaatccacgataatggggatgttatgaccgatggcatggccagaatacgattacgataagcccctctaaatcgtcaccgagccctggttttccctcggagcctgcacggatactatgagtgacttccaattcaacgtcacttctattattaagatgcttctccatcgtgtatggcggtgcacttatgggggagggctattttaagtatggttgtgggtcgggctcgagatgcacgacgaatcaatcccgttaccatgttgaccagtgctcctgtgcttttcccgtctccctcgatcattgtggcgtacgggagctcgggcatgagctaatggtagctatatgatgtcagattgagtggatagttttggagttgagctggtcttgaacaagctcgccgtcacagggctgaagctttgatattgatgtatgtgcagtagtctgcattaaatcgatcatctgccgacatgaagcacgtgctcttggctcacagaggcctatgcgtctacgttggctgacgcgttcgatttctcctgtaaggtgtcttcgattcaaaagtactgcggcgtactccgtagtaagactgttgttagtcatgctatttgtcctgttaccaggtcatgactactaatatctaatatcactataggcataaagctatggtggacggttcctgggtaccgaataatgtgtcacttgttctgagagctaataataatgataatgatggataatcataataattcctgatcaagctcggttacgctttcaagttaacaagcatttcatcagaaaagtgggggatgatgtaaaacattgaccatcgcagttgtttgaaactgaaactaaaatgaacaattggttcttaatttagttagttgccgaccggaaatagaaacctacagattccttcctgcaagaatagcatcgattttgttggttaatttaggagatttttaaattggttttttattttgatattttctaatcgattgaataattcggatcagatattgaatgtggttccgtggtatgtacgaagccaaaaaaaaaaaaattctatttttcccttttttttttttttctctctgtgaaccttttcacggatgcctaaagatgcctgagggttcaggaaccagatcacacttacgaaggggaaccgacagacggatctctgatacgaaaccaacggacagaactctgggacctaaaaattgcttctatgctcaaaatggagtcggtccctgaactaacgaggttgatagcatataataatagcatctgagggaacgcaatgccgcaggacgagcaccaagacccaagtatcaaataaagaacagtctttaggcgccttttgaaaccgactggttccaccgagtcaagtcaacatcgtctgtccgagtgtccactggcggagccttatgattggcactaatcccagagagggatgaaccgtggaatattattagctgaatgaaggtcccaaaggtcaagagttacaatctttgagtccaaccgccgacgtgccttttttagccactttgtgattgactgacggactgacaacttgacttgacaaaaacgggccccatttgaatccaatccaatccggctttttctctctcactcgctgttctcctcataatcatattaattgaatctctttccgactgtcatcatcttcaatccatcctccatcccttcgtcttttcttttctttcttcctttcttcccttgttttcctccctttactcctactgcggtactcccgtttaactaagtactactacttacataacgaccttctcttcatctgggattcgagacctttattgtctcgccctcttatcaaacattcgcttgtttgctttttctcaatgctcattatttaagagcttaagcttacatttcccctcctcttttctctcgcgcactcgctcttctgtcgctcgatcaaaagaaaccaacccctcttatcacagtcgccttgccgcgtgttcagccccacggccgtcgttcttccgagcgtccacttctcattctaccaatattcctcttgctttctctctctctatcccgtgacccttcattcttttttcaaggtgtctaaatcaaataccgccgatctggctaccttggctgaccccaacgagttgttcttgcctggggagaggcaagacaatctcgccatgtcaacacccgcggttcccctcctcaaaccgcccgtgccgggtaatcgcaacaacagcaatggtccccgacctccaaagctcaccttggggatccccccgtctcccaacgctcgtcccgttaccggtaatggtataccggctcctgcgcccgttccagcccccgctttagcccccgaagtgccacagctccagcgcccgtccacccgcccggcgcccccgcaactacgactggcgaccccaatgggcagcagtaagaatatccaacaagtcaacggtcgcccagctcccccgcctcttgctaccagtgggttgaacgaaccgaacggacactcacggtcaggtagcttcaactatttggatggaaaggccagtggccccgcatcggcttcatcgtcaaattactcggctttgtcgttcgccatgggtcttcgtcaaccacagggtagcactccggatccgtcgtcagctattagctcggtttactccgatcgggaaggaggtgtgcagatggagcgggacaacagcgtaaacggattgattccagatctcgacaagttgagtttagaaaagggcaggccactagacgtcgacgatttggatgatgaaggctggcttgcggccagtgaacagaagaagatcgtggagttaggcagtttgggtgagggagcgggaggtgcggtcactcgttgcaagctcaaggagggaaagaccgtcttcgcgttgaaggtaggtttattataccttttcttgctctttcagaaggggttccaccttcatattctatttctcctcgttactaatcgtgcggctgttgtagattatcacaaccgaccccaacccagatgtaaagaagcagattgttcgggaactcaacttcaacaaggactgtgcctcggaacatatctgtcgatattacggtgcattcatggacaagtctaccggcacgatttcgattgcgatggagttctgcgaggggggcagtctagacagtatttacaaagaagtgaagaagctagggggtcgaacaggagagaaagtgctgggtaaggtcgcagaaggggtattgaacggtttaacatatctgcacagcagaaagattatccatcgaggtgtgttcagtttgctcacaatgatcaatttaagcactaaccagaatgcagacatcaaaccgtctaatattctcttgtgtcgcaacggacaggtcaagctatgtgattttggcgttagtggagagttcggcaccaagggcgatgctaatacgttcattgggacttcctactacatggcacccgaacggattactggtcaatcttatacgattacgtcggacgtctggtctctaggcgtaacgctccttgaagtcgcccagcatcgcttccctttcccggccgatggaactgaaatgcagccccgcgctgggttaatcgacctccttacatacatcgtccgtcaaccgattcctaaattgaaggatgagccgggtaatggtattcgctggtctgatagcttcaagtactttatagaatgctggtatgtgaccccatttgcgttagcattggctgtgcggcggacctaactttacctagtctcgagaaagagcctccacgaagagcgactccatggcggatgctggatcatccgtggatgctggacatgaaaaacaaaaaagtcaacatggcgaacttcgtgcgacaggtgtggggatgggacaactagactttctctccgcagcaccactcattcctttgcaacacccctccctccatgcatcgaattgctactctccatcataatatatcgcatctttacggtcccttcttacgcttaccagtggctggccgttggttgaccaggttgtcaaaagcatacgatttgtgattatgacgacgctcatttgccgcattgcaacgtctatcgttactggactcatggagttgggattgatttttatctgatcatgcatgtctttcctttatcgttgctgatccatcacggacagctgtatccgccctctcgatctcggtttttgtcgccagccgaggtcttctttgcacaaaaagtgtcagcggccagcggtgctgacgcttcccggtttcatcccttgttttattgctgcttcgcttgcgacacaagtgggagaacttgttatttaggtgttttcgtctttattttcataccatctcgtattttctctgagcctcatcccttcttcggcacatacatattgtataagcttgtcattggtttgttttgattctatcatccaagagcatagcaactgtgagatggaaaagatcctctgtatatcggcagatcacactgcatacaggaagtagcgcagaatatcatcagcattttttttaactgtttatttccttttcaggagtcatgtcagtaaagcttccacacgccacaccaagtagacacctaatatatatatatatatatactataccgggacttcctttgcctcagatattctagccaagaatacaccaaaatcaaggtctgttatgaacagagggtcaataatttccacagaacaatcgagtcagaatggggcttagtgcttatatctaactctcgtattacgaataatacaataataactcccgaaaaaaaaaaaaaaaaaaaaaaaaaaaaaaaaaaaaaaaaaaaaaaagagaggcaatgatcacctgcatttccaagactaagtctgacgtaagatctactcctaagttgttttggttcgtcactttggcgggaacatatagaatgtaagcagttccagtataaaatatatatggctccaaaccacatgccaaccgcgtcacttttcaagcgccatttcttaatggatttgtgtttgtattatatggatgatatgtattttgctaattaagacaaaattgctagaaacaccgcgcaaagccgcttgtacaggatatcacataatggaatcattattgaaagatccgccagaaaaaccatcatcatactcatcatgaaaatccgggtgtgtacggtctagcgattcaccggttgagcacctaacacccatccgataccactgactaatccgcctgtcaccatattactgaccacatctcgcttacgcaccctctcttctgctgagtcctcgctgggtccgcgagcgtgagatgaaggcttcggttgttggtcggtggcagcggtaccgccgctgagtgggaaggcgttcttgtggagggctagcgcggcgcctcgggcaacttcgaaaaggcccatgggggcttcttcggcgttaagacggtcgttatgggctcgagcacgtctggcatgttgtttttttgtttcatatgcgtcctgttcgctgtctgttggtccaaagccgccagggacagatgagaggttgtctcctttggtgtcccatagttcttcctcttcggcttctcgtgtgcgaaggccgttcatctcctcgtcgcaccgtcgccaggcgccaaggatctcagggagtgggtcgggagaggggacgaggatcaaggcaagagaaagaagttccattcgttgggaaagttgggttatttgggcttggaggttggaagatgaggacagcgcagggtcacggtaccggccggcgttgtagacagcacgccaggagatgtcatcccttacggccgggtttgtaaggggtgatgatgtggataagagagatggaggagtgagacgcgtgtggatgtaagaatatgcggtgccgaaatcgttggacgagagagccgacgaaattgcgagcgacataatacgtcgctcggctgtgataacggcatcctcctcggaagtagatggaaggtctaggttgttgctatcggaaaggtgcgaagaaaaaccagccgcaaccaaatttcttccaattgcgagaagatcatccactctcgtgtaggcttttgagttttgatcaagtaccttctcgattaaggaaaggggatcgggatgcacacggatactgacgggttgaaaaggaacaccgtgttgcaaagtgagggagtagaaagatagaccatgggttgctgatatgagggcacgaatctctttgaaggagacagatcccgggaagtgtggttgaaaggcttgcaagctacggataatagttagctcctgggtcgatctgatgttcatttgtaccacaacttacatgtcgtatgcttgcttcatgcctcctctagttctgtttccattgctagcgttgtcatatgttgtgaagatggcctctttgacggcttcttcaacttgggctgagctaaggctagttttggaatttatatagatatcaatagccaagttgaattctacactcattagtctccacaatatgaaagttgggatagtgtttgctcacctttgatctctagcaatgccttcaagatttctgcctccacgacatctcgtgagatcctccaaaaaaggccatgacagggtgaattactttcattcccttccgttttgtcagagccccaatgttgcagccagagaatctgctcgcgaacgtcccgccagtcatggcttaattttgtttgtcttacaatagaagacacaatgtttcgcaattcatgtagttgcgtatcctggttactatgaaggcagatgttggcagctgttctgcatgtaacagaatgtccgagttcggccaatgtcttgatggagaggaggatggtgctgaggaacgatatagaggaagcggatgggcatgttagtgggttcgatgccgccaacaaagcgttctgcagaagggacactctcgatgacgaagagatctgagatgcatcaaacgtcactgaaggaagtactgagctgttaggcgaggtgaacaactgatcctcaagactcaacaacttggcaactcgcgtaagaaccttgattgagccctccaaacaagacttgcttgtatcggatgttgtatatataacggcaagtcctgattgaccatatcggagattcaggtccttcgacacatcgtgatcatatttttggtttccttcctcaaagcccccaaggtccgcatcctctggaccatcccaattaaggaaggcattcacagtgctctcataatctaccaggcttcgcgccagcagccattcgttgacgtattgccatccagagatattattactttgctgttgggtgttaagttgaggaagagaaatggaattggcctccgcagccttgttgagtctacgtcttttcgagcggttgctcccgtacatccacgggccaagtagaccgcgtaagttgttcactaaatccatgctgttcttctgagcgcccgtcatcgaaagaagtacattgatcgcggtgtggctgtccatcgactctagaacatccagagagaatgtctcatcctgactgggatagtattcgtagttgagtcggagtagcggtagcaagctagagattaaccatgtgcgcacagtcggtaggcgctggtagaacggtaaaagaagttcaagtataagaggttggagggcagtctccaaatctatacggtatgcccgatgtatgaggaattgagttaataggtcggttgggtcttgactatcttcgtcgtcgtggtacttgagtggtagtaaacgaagcgtccgtacacgtttcttggcagcagattcagagaacttgtcgactggggaaacatcgatatcgtcgtcgtctgtttgcgatggagggccatctaagagctcttgaagtactgacgtgtaagactggggcgctgtgctttccggcaggaaggtcaagatgatgcgaagtacccgttcaaaaggaaggtagcctggaaattgggcttgtagctgtggtaaacgggaaacattcccagtaacacagaggtgggtggctagaagaatcgcatgagcaccggatagccgaccaggattcgccatggtgtcaatcagcggcactctcgccggggaatgagggaaaataaagagggtgatgtggtcgggagcaatactaaagacgtcaaacgctgacgctcggaccaacttgggcggaaagcggcgaatcgaccggaagaacctcatcgcatcctgacctccgctcctacacgctgtgcccactcgtttcccctcctctaatctaccaccaaacacacaatggcttcgggtttcggtctcaatggcggtatgtgtcctttgtctagtgcttgaggggggaattgctatcacaattggctatggcttcgtggtgctcggtcgcgatacgtttcttcgatggacctccccggctaatacttgcgttctcctacaggtccttcccgctgctacaacttttggcaggaagtcctaggctgctacgtcgtcaacgccggcgatggtgagaccggcaagaagaagtgtatgcccgctttggaggattactacgagtgcctgcaccacagaaaagaggtagggtttcgcccttgcacaatggcaccttgcccgtcaattcaagacgcagtcgaatgtcctgttgatcttgtacgcggttctggtatattctgacatctgtggacctccaggctttgcgaacgatgaagatgcaggccgcctaccggaaggccgaagccgcacacccccgggagaacgcgcccaaggcagagcagatccgcagcttggggctgctagggaaggaagaagaggcatctgcttttctgacgaaggcttaaggggatattgtgcacactaggggtgcggttctgttttcgttgtttttactaccaccaccaatgtcgtgttgttgtttcctacttggagtccctcagtgtatagaaatggataagtctacttgatgcacgctgtttcgacgatacttgcagtgtgtgatgtctgctggtaatgctgcgaatcactgcaacccggtgttgcgggacgacacgatgatcgcttttgctgctactgcttgttttgatatgtaagctcgatttgccaaaatgaagatagcaacaaaaagacctacgctagtatcgtattttaaaggtggcggtgaaacattacgacggtgagggtgtaagtgaatatgtcaggcaaagtgccaagtactccgcagaatatatacataaactaaattagatgccgtctgattggagaatcaaacaacgtgtacttgtcatcgcctgaggcagacattgaagagtcaccaccgcgtgggaggctatcgcacggaacaaggaattgtattagggccgtctctcggtcgacgtgtgagtggacaaagaatccccttccttcacgttgagacgatctggcatttcttggcatgttttgggaaaatcgaccaccagcttacgtagaactcatgggaggaactactccgtacgtaggaaaagttcggtggatactctattatttcccgtggtagatatctgggattaacttgagaccgtccggtcgtaggattaaggatatagtggtacctgcagctaaaacccacggatcacttcggccgcgagtctcatcatgatgatggacattggcagcaatttcgcggccgtcgatcgtgaggttggcacagggagggtcacgtgaccatcagaaaacctttacggaagtgggtcgtctaagccggttcggggttagtacagggcccaagcatgggtaggcgcgcccagccaaagatgcccccaatgatataaacaggctgcgtgacctcgaggggggaaaacgaaagcacgacgggacgacttgttgatacctaccactttacctcctgggagcttgacggcccatactttaatatcggctcttttttactacaacagacgtgcccgttctccctctcccccctctccacttttgggattaatatttattattattattttttccccattctgcctttatgctcaaaagtttctttatggtctttattttcttaatacctttgggcctcacagatgatcgacttaatagtgtgaaactcccttcgtctagtttctgttatttttgtttttcttcaggtttaccttaattctccactctgtcagatcgatcgtccaacatttgtttttccctctctgtcttcccttttagttccatccgtcaaatggctgtgacgtgggtgtaacggttcggtatactttacattccttacctacctgactaagaccttctgcatacctggaaggatccccattacctataatatctgaggcgtcatcggaactctttgggcttggcatcttccttctctttttgtttttatttttttcattttttttttattcactcacgattgatcgtttatttaatacacctcaatcatccttccttcccttcccctccaccctctctgtgaagaggtgattgcccgccatgacctccaggtaagttccaaccgcccagccctgtcatatttagtttcccacgctaaccatctcgggacaggttggatcgtctggtcacgtgagtctcactatacttggaccattgtcgtgctggccaatgctaactaagcttacagtttgcttgagacgggcagcacgcctctcattcggaacactgccgctcaacagttgggagatgtccagaagcaacatccagatgaactattcaacttactggggcgcatcttgccgtatctcaagtcgaaatcatgggataccagaacagctgccgccaaggcgatcggactcattgtcacaaatgccgatatttttgatccaaatgaagaggatggcttagggatcaaaaaggctgacgatgaggacgatcttgcggtggaaatcaaatctgaagaggcgcaattatctccctcggatgaactcctgcagttagaaagtctagatctaacgtcgatcttaaagtacggaaaaaggctactaggtagtgccggcaaagaatatgaatactccctggccgccatggatccaatatctcgattgcagcatcagaagaaaacattgaactctcgattgggccttgcaggggagtatatcgaggacgacctgatcgatgacactgacttagctttgaagactccggctattaaggaggatccgtctcatgcggctgtttcccgtgagaacagtcaccaactttctgctcctgtgacaacaccaagtgagcctgccaacggagaggagtccggactgagcaagcggcaactgaatcagctgaaacgaaaaaacaaacagagtgcgaagatgggtgcgaataaagtgcgcgtcgtcgatctctctgcgcggaagacgtccgacgtcacgacaccgtcggtaacgactccgcaccctataaaagcagagaacggagaagagcggaacggcgattcgaagtcagactacttctctcttgaacgaccatctggcgatgatgactcaaaaatcgtctctgagttcaaaggagaggccgctccagaaaaacctctgattcagcctgagtcctccgacgaaggccccagcatcgcatggccctatgaaccaatgtgtgattttctcatggtcgatctgtttgatccaaattgggaagttcgacatggagctgcaatggccctccgagaggtcattcgcgttcaaggtgccggtgccgggcgcttgcgagggaagagcagatctgaaaatgacaccttgaatcgtaaatggttggatgatcttgcttgtcgccttatttgcgtcctcatgctcgaccgtttcggcgactacatctctgacaacgttgtggctcctattcgagagactgtaggtcaaacgttaggtgctctcctgtctcagctcccatcccgttccgtcattgccgtctatagatgcctataccggatcatcatgcaaaatgacctaggactagaacgccctatttgggaagtttgccatggcggtatgatcggtctcaggtatttggtggctgtccgaaaagacttgctcgtcaaggatgcaaagctcatggacggtgtcctggaggcagtcatgaagggcctgggcgattacgacgacgatgtgcgtgcagtgagtgcggcaactcttgttcccatcgcagaggaattcgtgacctctcgccagaacacgctcggcatcttgatgaacatcgtttgggaatgcctttctaatctgcaagatgacctcagcgccagcactggatcggtgatggaccttctagcgaagctctgcacgttccgtgaagttctcgatgctatgaaagcgaatgcagctgtggaccccgaatcgtcgtttggcaaccttgttccacgcctctatcctttcctgcgacatacaatcactagcgtgcgctcggccgttcttcgggctcttatgacattcttgcagctagaaggagatggcaccaatgaatgggtcaatggcaaggcgctccgtctgattttccagaatttgctggtggagcggaacgagactgttctgaagttgtctctccaagtctggtcagaactgctcaaagctctcgacaagcatgggtccttcaaatccgaagccgaactgctgtctcacatccaacctctcattaccttaagtatggctcctttcggcgttcctcgctaccccatcccgatgaatgcatccctcttcatcaagccgtctggtgtaccgttcccaatgagcgcagcggcaccagcaaagtcctcgccaagtgctttcaacaatacctctgatgcgaccaagaagaggggtcgcaaagcagagaagaaagaagtgcccccgccttcagctcacaatgttgatggccatatgctacaaggtgatattgacttggtaggcgcggacaccatgctgcggtctaagatccatgctgcaaaggctcttggtcaactgctctctttttgggataagaacggacttccaagcctgtggcagcctattctgcacggtctgaagcactcagcatccacttcccaacttgcaactgctatgattatagaggaatatgccaggatccaagggtctgacagcccgtatgcttctgtactgtgtgaacagttgcgcccaattatcgaaggggaccgtccatcatggtacggcgatatagcatgctatcttcatgttgcacgtgcacaatgccactctttgctaaatgccttccgggaccacgctcatgttcctggttcgagattgcccgtgctggctgttattgttcaaggtgaagccgaggctggcccgagcgccttctcgctggcggacgccgaaaaggtcgttggacccgatttcgagcgcctgaagaagggtctggcacccgctcagcgcattacagctcttcaggttctgaatgacacaagggcaactgcagagagtgcaattaatgaagctagaagcgtccgtgaggcaagggacctgcgtatcctcgctgccgcagcgggtgctctagttgccatgcataacatccctaagaaaccgagtcacattattaagggaatgatggatagtattaagaaggaagagaatgcagaactccaacaacgctctgctactgcagttgtcactctggtggagtactatactaccgctaccaagcgaggccctgtcgataaggtaatcggtaatttggtgaaatactgctgtgtcgatacgtccgagactccggaattccaccacaatgccggactggagaaatcgattctatccctccgcaaagaagaagaccgccgtgaccatccggatgcagcgaaatttgaaagggaagcaaaggaagccagaattatgcgtcgcggtgctaaagaagccttggagcaactggctgtcaagttcggcccagcacttctagagaaagttcccaacctggcatctctggttgagcggccgcttacagatgccctcgccaatgagcttcctgcggatattcacaaccctgacaatgagcttggtcaagaagtcgtggatggtttgtccacactacgtgccttattacccaagttccatcctggtcttcatccttgggttgtcagtctcatgcccctgattgtcaaagcactgcaatgtagactgtctgtgattcggtatgcggctgccaagtgcttcgcaactgtctgcagtgttatcacggtggaaggcatgaccatgctagtcgagaaagtactgcctaccatcaacaatggcctggatgtgcaccaccgccagggagctgtagaatgcatttaccatcttatccatgtgatggaagatggaattctgccctatgtcatcttccttgtcgtccccgtcctaggccgcatgagcgattctgataacgatgtcaggttgctagccacaacgtcatttgcaactctagtcaagcttgttcccctagaagctggcatcccggatcctcctggtctctccgaggaattgctcaaaggacgagagagggaaaggaaattcatgtctcaaatgttggatgtccggaaggtggaggagttcaccttaccagtggcaattaaggcggagcttagaccttatcaacaagagggtgtcaactggcttgctttccttaaccgctataatttgcatggcattctttgtgatgacatgggtctcggcaagactcttcaaactatttgcatcgtcgccagtgatcatcatttgcgagccgaagagtttgcgcggacccaagcgcccgaggttagaaagcttccgtccttaatcgtctgtcccccgtcgctctctggacactggcaacaagaaatcaagcaatacgccccgttccttaagtgtgttgcgtacgttggacctccagtagaacgtgcgcggttgaaaggttcccttggcgatgctgacattgttatcacctcatacgacatttgccgaaatgacagcgatgttataactccactgaactggaactactgcgtcttggacgagggacatcttatcaaaaatcccaaggccaaggtgaccctggctgttaagcgtgtcgcaagcaatcaccgcttgattctttccggtacccccattcaaaacaacgtgttggagttgtggtccctctttgacttcctgatgcctggcttcctcggtactgaaaaggtcttcctggatcgtttcgcgaagccgattgcagcgagtcgtttcagcaaatcgtcctcgaaggaacaagaagctggtgcgttggcgattgaggccttgcacaagcaggtgctcccattcttgctccgtcgtctaaaggaggaagttctcaatgatctaccgccaaagattattcagaactactattgtgatcctagtgaacttcagaagaaactcttcgaggacttcacaaagaaggagcagaagcagttggcgaataagatgggcagttcagaaaagtccgacaaagagcacatcttccaagcattgcagtacatgcgacgcctctgcaactctcctgcgcttgtcgttaaagacgggcataagcagtatgacgaggtccagcaataccttcatgcgaagaattcttacatccgcgatgttgcacatgcccctaagctaagcgctttgcgtgacctcctcctcgactgtggcatcggtgttgacccgccaagcgaaggggacctgggtactggcgcaagctacgtgagtccccaccgggccctaattttctgccagatgaaggaaatgctcgacatcgtgcaaagcgaagttcttaagaagcttctaccctcggttcagtatctccgtctagacggtagtgtggaagccaccaaacgtcaggacattgtcaaccggttcaatacagatcccagttacgatgccttgcttctgacaactagtgttggtggactcggtctgaacctgacaggtgccgacacagtcatcttcgtcgaacatgactggaacccacagaaggatatccaggccatggaccgtgcgcatcgtatcggtcagaagaaggtcgtcaatgtgtaccgattgatcaccaggggtactttggaggagaagattctgaagtaagtttgctttccattttgaatttttaatagacccacgacatatactaacctgtctaccacagcctccaacgcttcaagatcgacgtggcatcgacggtggtcaaccaacaaaatgcagggctaaacaccatggacacagaccagctcctagacctattcaacctcggagaaacagccgaaaatgccgagaagcccagcgacaacgccgcgggcaacgaagtcgacatggtcgacatcgacggcgaagtcaaagaaaagggcaagaagggctggctcgacgatctcggcgagctctgggacgatcgtcaataccaagaagaatacaacctggactctttcttgcagacaatgaaaggatgatagataacttatcttctcaagacctcgatttacccaaacaaatcatgttgtgtggactggaattctcgagttcgttcttatcgaacctcacagaaaagatacctcaactgcaaaagacatccctcagtcatgctttttcttcttttctgtcttatttctcatttcacccctcttcttttcaccttttgaatcctatcttattactagacgactgattgaacccgggtgggcgttagtgttgtacatccatcactcagattctctcctctttacccccctgttttcatacgaactgtatcccaggagttaggcggcgatctgtttgttttcgaatttcttactttatcttaatgattcattgaatcattgattgaacgaatgactcggtgcttacgaagacgaaatcaaggatagacatggaggggaattatctttcttattttattcccttccgtggtgtttttttatgttactttattatcctttttcttttcttttccctgctgtacttttactactgcacttgtgtacatattgacaggcggttgtccatatcattcgatcttactaccggtaccttgatacagtatttggtctgttacggacaaacatgtttctctacttgaaggatatgatgaagtagtgtctattgtaattactgagtagatgttggtttattgtagtgtatgatgtaattgattcattgaaatgatcttatacactgataatgtagctgaaacaaaataggaaacaaaaatcatcgaaaccatttgtaggtacgttcattatttcaacaaagtatcaaaccgatcaaccaacaatcaccatgacttatggagacctaaacaaacagaaagaagatcacaaaacgccgtccagaacctgcataccggatgcctccgaacgcctgcgtgtgacaagaatcaaagacccactgataggtagataggggaaaagagaccaggcccaaaaggagagaaatatcagagccgataaaacaagtaaatacaatgactgatcggtgatttggtataatctacgtggaaaataaacagagcatattcgtctggggaatttgaaagaaagttctcaacgtcgaaatggcgtctatgtgcgacccaaactctcgtaaaatgcaataactggtcgtggcagttccaagtgcttcgttatggtggacaaggaacgattaagagcggttctttggctgggcgagcgcgttcagccggctcatagtcagcgcattacggctcttctgtcgtgcactggctggggttcccgttcgactagcacttgtggtcgatcggagaggagtgtgtgaacgcgccttggtggggctaggggttggcatcttcgatggggagaacttgaatggtgagagcttagatggggagctcagtttaactctcttcgcactgcggttttctgcggcagtatcggctggcggcacattctccgtgtcaacatctctcccagctgcatctcggtgtctcttcttgttgccgatgccatgaggcacacctggaacatcgggaagagaagggtcgtgagtggcctccgtctcgcggtgtcgctttttgctgccgattccatgtggaacgccgggaatatccggtagggagagattggtaggggcatctgattgacggacgtggcggatggtgggcgacttggtcttgctatcggacttctttgaagcatggtccggtgtcaaggctggcaaagtgggataaacaatgtccgatgcaactcgggacggagagccggcagtaaatttggagggagatggggatggcagagcttcatcatcctgcaatctagtactggaggagaactcaacgcgcttcttgggtgatggtgtcactgcagactcttctgaagcatcgtgggttgagcccaacaagaatttggaactgaattcgggggctgccacatgtgtgcctgctgcgatcttcgcaggatctttcgaaaacaaaggttgatgtggacgaaggatcgactttaggttcaactggggcaagccactcttaaatcgaggattgaagtccgtgttgggcgtgcgcggggtattcgactgctttgaggtaggggaatgtgcaagagatggtcgagggagcatgcttgtccgtgggggtctgaggctggtggacgaagtacgcgccatggaggctcgagtaggagtcatcaatgaactgcggatagcgggccttgtgcgagtcacggctggctttgaagcgctcttctcaccaacagtctcacggcgagtggaggtgtcatcgctcctatcacgtttgacgcgcttggcaccaactggagcaggggcaggcgatttagtcggcgatttggtgggcgaattttggttagactcatccagccgtgccttggaggtggtccgcttgagatccttgcggacgggctggaagcgaccaggagtggcgcggaaggcagacgcgtgtccagcaattgaatccatcttcttgaattccgccatatgagcagcgttgaatcggctagcctggccctttggttcagcgatcttgcgattttctgtctggttgttgctatcctggtcgggctgactctccttctcctgaaccatctgagctttgattctagcaacatcctcgcgcacgctctccatgagcttcttagcttcatcgcttagctgggagtcggcggaagaaaacttgaactcgaaggcgggcgttccgtagtatgtcgaagcgggcgacgtctttgtcttgcttggggtagtctcaactagagaatctttcatcacgttcccttcggcatctttcttaatcgggttgaaacccaggatcaggcccgagtccgcctgcttggtggtgctttggtggactttgctgggatgcatctcttggtgggatggacgagtgactgcactggtgggcgttttcgccggggtttgcttttgagcgggagtagccttgtgtggggtgcggacattggttgtggacttcggagtagtagtggtggtgttagtagtggtgtggttggagggaacgtcggcgggagtctcgtcgcgttccatgacggaggggagtttgttgttattgttggtggtgtcagtagtggtgttgttgacaggtgacgcgggcggctgcggttccttcaaccaggaaccaaagttagttgtctggtacttgacaagacagaagcaagggcaaacttgggcaagtgaatgaattggagtcaacagtcgatggatttgtgggtgacttacattcgaagcctggcgattacgcaggcgggcggaccgtcgaaccgccatgatgatgggaagtgagcggtagaaattgaattcagcaagtgatggaagaagcgatcagtggaatgatggaatcgtggcaaaggtgacgaagggatgaaaaagagaaaagggaacgaagggcgactctcccgattaggcgagaatgtaaacaaatattgccgggcggtgagctgacgtcagtggagtgatttcatctaacgtgactggagcatctgatgtcagatgcccttaattgacctcgagacactaccaccatgtatcgtcagtatcccactctagcttcccaactagggaacatatctccaacataccagtatgtatgacaggttccaagggacccgccgaacatattactcgcagataaagtaggaaatagatggcccaggagctgcagggcgcgaaattagacattcttggatggacaggacgatcaatcatcgctctccgttttcttctctccccggccccctattgcgttccttacgcccccaactctgtagttctgcattcccaagtcatcgttgatcctcgtatactcgagtagatacatgttgctccagtaacatgggacttcatagtttgaataagctctaaagaaacctagttcgagctagcttatcatccggtcatgagcgaggagaagaccattacgcttgtggggaccaattaacataactttctagaatctcccgtatatcgctaataatagtagtagtaggctgatgtcaacatgcgtactattatgggatactcggcgattatttagtacactcttcattaagtggcgagctaactattcactatcaacaaacccgagataaaaaacaacaaaaacagcagtaatatcaagcaccatgcccgtattacatccctaaatcgtactctcccctgggcaattctctacctcaattacaaggtcacaacgatcttcctcgccgagatgcccttctggaacaaagaaacaccctcagggatcttctccaagccctctccaaccaccaagggctcaggaaccggcttcaacgtcccatccttcaacgcctcagggataaacttgccccaaacatactcagagatctccttatgatcatggagattcgcgacatcaacaactgttcgcacatatcagtacacctgactcccataacgaggatatcggataggtatgaaactcaccaccaacaagctccacctcttccggaatatccttaaccggcacaggcaagttcgtaaccacacgtccaccaccaagtcccttgaccacgtccgcacatttcctgatcgtctcctcctccgcaatagcttccaggacacccagaaattccccaggagtatcccgaatagcctggatcaggtcctgaatgatgctatcctcgtggtaatccagcaccttggcggcaccgaggctctgcacgaaggaatggttcttcgcagacgcggtggcgatgacggtggcccccgatgctactgccatttgaatcgctgcgctgccggtgctcgatgagccgccccagacgaggatgaccttgttgatggggcttgctttgggggtaaggggtaaggggagttcaagccggccagctgggtagaggcccattgttgccgttgatagggctagagggaggacgctcccgctttcgaaggacatggtgtccgggaggggggccacgaggttgactttacagattgtgtagttctggaagccggagtccctgatttcgtttgtaaggaaccaattggctcctctacaaggaggttggttagtctagcccttcggtagtctgtgaagtgaggtgggtttgttcctaccctattactcggtctccctttttgaaggtggttacgtcttggcccacttcgtaaatctctccggctacgtcggcgccgaggatctatttgggcatgtttgttagctactgttttcaagggagaagaggtatactcacaaagggatactttttggggaaaggtaagtgcggtccatagatctggatcttccagtccactgagaatattcagttagcgacctcctatgaaagcatgaaggaagcaagacgtgtgaacgcactggggttgaccgcgacagctttgttcttgatcaaaacttcatcaggaccggggctaggcaatggggcctcttggacaacgaactgtccgcccgcttctaaaagccagaccgcagagttggaggaagacatggttgcaaagggcttatactgggagactttgaacggatataagcttgagtagattgtgtcgattttgattgtgattgcgactgtgtattaaacagagagtatcctcttgctgagggtggtctctatttatacccatcttttccatcgtcctgtcggtgttaacggagcagtccaagcgacctcgagccgaattcacatcagagctacttggatagtgatagaacgttgagtatggtgaatctgtggggacttagaatgggttctgctaattgatggatcggcgactttagggctatgggaaaaatacgagccagggttaggctgttggaactgcgtagtttatcggcgttccgtcttaactccaatttatctccgaagggacaaacatcgagcaacgtcaaagtattagaaatcgagtgctttgtttctgtttccttcttcacggaacttggtgaattacgtggctatgattgctcagctcgtatatttttgacttttgtacacaggtgatcaatcatccagtaattgatagtacaggtaacactgactctactttggttccaggtttgtcagtcatcataatccaaatggataagtctcctcctttcctagtggcgtcgccggctcatgtttctccagtggcttcacagcctgtgtttcatcgaaccacacatacccatcaaactggttgagcaggtctgccgcggaatagtgggatatcttctctgtatccggccggtagatcacaccgatgaatcgttcaagccgaagaggcgcagcttcaaacgcagccgccaggcctggatcgatgtggtcccgtcgcagatcgattaagaaactcgagattcctgtattatgggcgacccgttcccagctatcttcccgcgagggccgaacatccatgacctccatgtcttcatcccattcgtgtgctgctgccaccgtaccggtgtgcgtgccacagccaatcaaggcaacattgttacggccgaactgctcacggcataactggccgatattcacctctttgcgccggatccccatactagtgtgtcgagcgtctccgcagtgagaattgtgtgcccacaccacggcttttgtgccttcgggcttatgacgcaatattcgacgaagagtatctaccatgtgtgtatcacgcagtgtccacgacgacgccgagctgtaatacatagctttatagtagcgctcggcatcgcgcaccagatacgcattctgttcactgctatggtattcctcgccgtcatggcggttttcggagtactccagtcgtcgttgtagcaagtcacggagcgtgtctagcacccccttctcacaattcctcatcccgcgcaccgaagcgagcccgtacatcgcaggatcatccacccatggctgcaggcagccgtaccgctgacgcgcaactttaccagcagcgggatcaacacggtcgaggtagtcaatcacttcccggatcgaggcccccatgctgtatatgtcgagaccataaaacccggctttcttgctgtctggtacctgcgcattgtaatcccgcatccattcgaccagctcctgcatttcgcgattgcgccacatccacgtgggaaaccgagtaaaaggatcgatgggtttcgagtggcccccgatctttgccttggggcctggacgctgacgcacgtagcggtcgattacctcggcgtcgggccaatcagcctctacggctaccacggtgaagccatggtgctggattaaacgcttggtgatctctgcccgcgcgctgtagaattccgaggtgccatggctgccatcgcccagaaggacaaggcgataatccgcgaagctgtcgaagtttgagctgaagctggggtctttaatgtccggcagaggatgggctgccgctgcgaatagtccctggagctgtgacatagtagttggatgctgtcgcaacggttgtatgaaactccaaaatttacggttcatgagttcatgttgtatacatactggctcgatactattgacactgtagtaatataagtatatagtctattgttgagcgggtggcaaatgaaatcatatgcctattgaccagcgatcatcatgacttcatatgctctccatagtaatattgagtataacctttcctaattgtatatttagaaggtcttaatcctccagtaatattaactagaacctacagcagcagtttcatcgagcgaaactgttatagcagacactagacagacctttctataatataacgtggatagtatcaagaatcgtagccttggtttaccgctcggatccattgtcctccgaaccgatctcgaattcatctggtacatggccgtaaagccacttcgatctcatattggaacacgtctccagatggccatacgggacgcccgttccgtttcatgatcgtcaagtccggcttctcaagggaatgatgggctttggatccttctggtatttgccatcgattgatgcccgagctggcagttttttaacagtttagcgcatcccttgaccaaaattgcagtgtttgcttgctttctaaatctcaccgaatgaggacagcctttggatatagcttttgctccgtcgccgtttggtaggcaatagcaatgtattgtcgaatggtttgggcgctaggccgaaggatttgctggcttctgttctcacagtgaaccatgctgtcaataggccatctgattggctgtatttagtgagctggactctgatagctccaactcccccgtcatacatcgagattatctggaggcaggggacgggctgccgctgtccatagttcctaaagttgtgacatagtatgaacttgtcggaacggtcgcaaataattccacaatgtgcgattcatgaatcaatgttgagtacacaatggctcaatgttgtctaacactgtagtgatatgaatttgttagagagttcattctattgttggccgagcggcaaataaagatcacatgtccgtcaacggcggtcatgatgacttcacaccctctccatatgcgccttcacggctgtcaaacgaaacagaacgaccattaagcatttcgaggttaatgtaggtcatgaaatttcccaagtgcatgctcagaagatccaattatccaggaattttaaccagaacctacaatagtcctctatatcccagcattcgtaggatcatgtcagatgcattcccggatgtcgcctctcgcctggagcgtttccaagaagctcaggaatcactgtatggcgacctccgctctattgcgaacccccaagattggactccaccccagcagtctggaggtcatcgcggtcgatacctctggactgacgctttcggtgtgatcaacttcatcaccctacaccgtgagtatgagaaggcgctggcatcctctacctctgcacctgatgaccgatacttgacgctggcacgtcgactagttcaaacagtacatgacgtgctggggcgcacgcgggatggccaaagtcgccttcctggcgcaacagacgacaatccgatgggtggtggactgcgtattggtaagatagaagaacacggctcagacggtgatggccaataccatcactatctaaccatatggatgttcgccctcaaccggctatcgctggcaacaggtgacccaacgtacaatcggcaggcgatagcgttggcgaaagccattcaccctcgattcttcatcggacgccatttgtcccggccgcggatggtgtggaagatgtcgatggatctgtccacagccctggtggcttcggagggtaatctggacccggtcgatggctttgtaacgttccggttgttgcaggcggcagcgatgcagatgggcgagggcgaagtgctggctaacgagattgcggattacaggaaggtgatggagagaaaaggaaagcactttgtgacgagcgatccgttggatctggggatgagcctgtggacagcacattggttcgcagagaaggaggattgggcaacacaattgtccggtgaatgttttgagcacatctgtatgccttcaatgcccgacttgcccctctcgtcatgtttgggaataacatcagacagatgagctttttgagattgaccgttacctcgatcgcagccacaaatatcgcctggcttttcgggaattcggaacttgcatgggcatcaaatgcatgtcagagcaatcgaccgagaaagaaagcgcagtcgatctcaaggtgtatgctgacaagatcctggactcgtggaatatatacatgcaaaaatcactcgcaaccaaaatgacgccggatgatcttcgcccaatcacgcgggtaatgtacgcatcggcattgctaccaggaggttagtatataaattcccgatgctgcggcacgttaataatattgggctgaccgtaatctgcagcttttgctcgcgggtacttagggccagaacctatgcccagcccagagaggtaaccaaacaaagaccttgagcagccaaaatgtacttgaaaaacaaattcatgtgtatattttgcatgtagtactctacaatatgtatcattgcgccagataccgtgtatactcgacaatatatgtccccggtggcaaatcgtatcaacgtcacgcaaagaaaacaatgaacactctatacgcctggaatgcccacaacatccctccaggggatgacccgccggggcagaatgtagatggcataaacggcgcttagggcgaccagtaaaccggtcaactgtcacgtattagttaatcctcgaaaaaagggtgcttcggctaaacaagcgtgtcaaaggggcgaaataccttctcaaaccacgtatggaaccagatagcagtcatcaacaacatccaccaacccaggcccgtaactgcgcccacgaaccatacagaccacttcctcggcccattcaattcgcgatccgcgtcctccgactttttgcttccctggtcgatgtccggagcgcccctccatgctccaattgtctcaaataccagcatcgcagtcgcaaggaccagcatgaacacgtgtccgcttacatcatgaccgcctctccatgctccaccggcggccttgcacgcggtagccgtcaacagggtgtgaaatgaggcagaaccctcttcagcctgcgggacgacctgctcacacttcccacccgaaataacaaaactgcgatcgattattgccggaccaaaaaaccattgtgtagtcaggtaccaaactagggtagccagagaataacgagcgagcgcctggccgacccgccgcggttgttgactggaagtggtcgtgtacgggagttgagagaatagaagggaagcgaaagccgcagtaacccaaagccagccaaccttcacaaaatatacattaaagacattgtccttgcgggcgaagtaattgacggggtgttgggggaggtttacatccgcagcgattgaaggggctagaggagtcggatggtcggagggaggatctcgagttccctgtgctgtcggagagagaacagaaaacagcgatcctataattaaggtaataggatagacaaggagggctgtcgtaggtggttggtataaccgcggtattgttgtggaaggggatttgtctggtgatgccatgtttttttcacctgcctaatttcgttcggttttcgatctcctttctcagccttccacgtttcctccgtcagattacctgacgacgatgaataaaacagactatgagatagagccaagtgaattcaggattcacgcaattgagtgagaggttgtgtaggtgaagtcgggaagccgacgaggtgattcggcggaaacggaggaaatgcagccatagtaataattaaatacactttagcctcggagacggagggatgacgtcgatggaacgcatgtgcccaccgccagtctaatttaatcatgcagcttcaccacattcgccaccatcatcttcgaattatgagaacttgatggacgtattcaattactagcagtcctggtggtaaatgaagtgggaagaatctttagatcggatttcttttatcggcccagtgagtcaatacttgactccaagaattagaactaaccctactaagtattaccctaccctaggtcattcataaacatgtacatcataaatctcgaaatgctctgtacaatcagacttgccccttactgggccttaggcagcgaggcctggagcggcagtttccgtgaggagtttccaacgtagatcgtcttggggtaaggagtgacggtccagtcctgagccgaaacgtcccagtttgcaaggtcacgacgggtaagggtcgttgtccacacggcctcctgcgaaggggccaagtgaatacgctcaaacttgcgcagtaccaccttgggctcattcgggccgcctagggaaacgtactacacagaaaaagttagcattgaaattattacacatcacccaatcaggtcaacttaccagctgaggaacttcatcaccggcgacattgcccgtgttcttgaccttcacagagacgcggaaaagatcctcgtacagaccggggtttcctccggcaccaccactagcgggcaaacggggctgggcagacccatccgtggcgccttcgggaatatacttggagtcttcccagccgtagttagaatcgtcagacgatgccttcaggtcggtagagttgatccagggatagataaactcatggatcctttccagcccctccggatacacgtactccgacgcatcgccaatttcaccaaagttctttgcagcttcagtcatgccactggtgggagtgtatcgggacgcgttcaggggctgaacatggaggtcggagagctcgaaggtggtgtagctcaagccgtagccaaactcgtagataggggtctcattgaacttatcgaaatggcggtaatcgatgaaaacaccctgggtgaaatcagactggggcgctccgttgccattgttggcatccttgaccaagggagaaccatacgactcccgggtcttgccccaagtgaaaggagacttggcgccagggttgacacgaccgtacagcacatcggcaatggagttaccagactcctggcctggcagaccagcccagagaataccagtgacattggggtggtcataccattcatcgatcaaaactggtccgacggagtggatgatgacaacggtgttgttacagttattcgctgcggtcttgaccacattgtcgccgttcttccacagagtgatgttgttacgatcgccctcatttccatccacactaagatagccttctcctgagtcggagttgacgaacacgagagatacgctggcctggcgggcagccgcagcgatcttgtcgagcgcccaactgtcggtcacggcgaagacattaccacggccctgaagaacttcgttctgaatcgcctgctctggtgtcacgaggtatgggaaattcgcagtaccgctaccccaggccatggcaagggtaccgttatcgcaaccacggtcatcacagccgttagcgccccacgagttggaacccgcatcctctcccagaagggcgaccagcttttccttgcggctcaagggcaaggcacccttgttcttcagcagaacagtgctctgcgcgccgatgcgacggattaggtcggcatgatcgcgttgcacgtccacgaattcgttgaccctctcgtaagcaccttccgaaacatggttatgcgcgaaaccatattcgtccctggtccacgagctgaagttgggaggggtgtatttggtgtcgcggccaaccttgtaataagcggccatgatacggacagccatgtcatcaacacgccattgggggattgtaccgttaaggacaccgaccgtcaagtttgcaccccagaaagacgtaccactatcgaaggtaacatcaccgggcatcgacatatccagacctgctaaagcagcgcctacgccgctgtgatgagcggtccaatcactcatgacgaagccttggaaaccaagctccgccttcaaaagcttgttcagagtttcgctattctcgcaaccgtagctgttgttgatttggttgtaagagcacatgacagcaccgactccagcgcgtactgcatccgcgaagggccagaggtacaattcatgcatagtcttgtcatcaacgttggaactcaaactgtcgcttacgttgaatccgtaacccgcagcctcgggttgttggcggaaatgctcttgttcgttcatgatataatgcttagctgtcgcaatgacaccagcatcttgaatacccttaatcgtctccgcaaaaagtacaccggtgagggctggatctggtgagaaaccttcccagtttctaccgccatccggatgagcaccgagagggccagcagcaggacccagctgaacgtcaatacccttatcactgaactcctcacccattgcctgaccacgaaggtaggcgagcgtcttgtcccaggtggcagcgacattaacacccgcagggaaagctgaattgtagtccgctgcgcgtctactgttagcaacatgttaggaaggaaagggaaataaaagccacacgtacagaaacgaataccaagaggactatcctgcaaacacaagctggggatgttgagtctatattcacaacaatcagccttccgtaagagtataaagtcatgtgaaaatctacttacctgggaacactgccagtttgtccaacacacctctctagttgccatctgaagtactttagctaatcgagcttcagacacgctaaggcatacgcaagcttaccctgttccagtcgttaagttgactttctctgtcaacgtcatctgggaaactatgtctacagcgcgtttgtatacttccgcccattcaccctgaccatctgcccatggggaagggtagaaaggaggggagtacgcgagatcatcctattcagagtaaaaattgttaaaaagctgattcaattgagtcgaatagcaccgtatgagatgctgaagcataccttggcactgactactgaggcagccgccaatgcggccacctcgatccaaccaagcttcatgataacgtggcaggtaaccagcagaacagaaaatggataccaggccgccacacagtgctcacaaagagtgattgttgaatgagggaaattcaccaacagtggaggggagaaaggtgatataaataagaaccggcatggtaacgagggatcaaccgacgccaccaacgatgggaaggttaagtaccacacatgatgtattccttgcttgctgtctcggcaccgctacccacttgctgttccagcccaagctgtcacgcatgcaaagggggaaaagggagacccgctgtttgctcggtgatcggcgtgggtgtaccagatggagcgacgcgagtggaacaaattccatcaataaatgcgacgatgcgggaggagctataatggatcctttccaaagggaaaaaaaagggaaaaatagcaagagagccaattaacgtcatacggaggaaaaagcaatgacgatccgattcgttactcgtagactaacggcgaactcggtccagcaaccttctctttcttagggtactgtgttgtgagtcagtgcacattgttgctcggcattctgagccatggcttgagaaagtccatcaggtggcctggtgagccggttagaaaggcatttgccccgcaataacaaccctggcgcgcgttggtttgttatcttttggcccttgggtaccagcaaagaaaaagaaaactgggggaacctttagaacaacaaagggaccatcaggtactacgggggaaagctggggacgctagtgcccttcaggggtagttccctggtaatcggattacaaaaccgcagtccattcatgccttcccagtacactacagtacatacaatactccgtaggcactgttgaattctacatacattcttcggaaagtaaagttcaaaacaataatttttttgtagtatgtttcggaactgatattccagctccttctcaaaatcgttaatactccttcctactttctttcccaggagttgagacacgacaaggcatgctcctgtaggacaaggactgggtagatacagtacatctgtaccatactgacaatacctggcgagttgatccatattacccgtacgcaatatccattccgggaaagaaataggccttaggcggccattaaactaggcaggattcaggaaagtcacaatagtcattacacaccactatttcatggcaaaggtgaattaatggagaaaataaaattaaatcaattaaaataaaatatctcttggttccaccatgccataatcttaatgacgagactaagatcacaagttccgcatccgtctacacaatgcatgggtgatgttacggtatcactgcgagaccagcctcccccgcatcttactatctttagaggggtttgctggggaagggagtgagttggctcacccttcttgaatcattcttgggtcgcagggatcatggtccctatccttcttgccttccgcctcctgtgtcctagattccctttggcagggagcaagggatgtaacgagcacgtgtcgtgtcctgcacagtgattctagatctagacctatttctatgcattataaatcattccgtggctggaacaattggtcgcgaagaatgaagaaaaatcagaaaagacggcatcgatagattgtgatcatgcagtcggagtggagtccagtgtttactctcatcgttgatcgccctccattatttcccgattcaggcggtcgtcggcacagacaccgacatcattttatccattttagcagccgatgggttcaaaccctctccacgggtcatactatccatcggcatggctcgcgttgctcatgctccggacagagttagcatgggtgtgtgcctttctatgcggttggaatatggtccctacgacatcccgggacgatcttgcagactcttcgagatcttcattccaacgatgaactctgtttccgtctacagtagagatcgcttgccacatggctgtcagtttcaccttaatccaaactccgagataaaaagctcgtataataattgaggatcggtaccggggcacggacggcctcttaaccatctccgtcggtgtgtcgaaagtatgattccggaaatggtccgaaggcgaagattcggggttgcggggaatccacagatactccgtgaggcgtttattattgaaggtggaaggagtcaagactcaatggactctcaggattcctcccgctcattccgacaatctcattctttgcaaattatcaccaatactactccgtattgagggtttcgagtgtgggggaacttggcctgaaggttctgcttttcttccccctcaaagaacgatttatttgacaacaacactccgagtattttcagatcgaagcactaataccatatattaccgcgcaaggtgagtttagtaccaagaatcttggcctgaggacactgcacacaatactctgtagcagcaatactcagcattactcagcattaaccgggatgcgcaatttagcctgtttataattcatttaacgcaatgcggagtgcatagtgtacatgtaaataaccccacacagtgtatttgataatttatctcattttgaccatctatacggcctcagaagccaagaaacaaataacaacttgacgtcattctcagcaactccactgtctgaacacacgatacaagcatgcctttgtcacttagacaaatgagccagccactgactagatcttggcaacaagcaagcaaattctgaaccgctatttactcggaggaatattccccacacttcacgaagaccgtggggtaaacggggtctggagtaccttcaactggccgcaattcccgaagctaccgcaaccttgcacttgggcaatccgagggcgctcggattcccgtgtcttctgccgatgtttagccataaagaaggaaatcgtgcttttctcttctagacttggtaaccaattataccctagtctgactctaagagtcattttttgtatcttttaagttgagggtccagatatagagtttcgagtatggatattgaccacacaggtgtcgtcgggcacttcggctctggggaacggtactctacgcggtgcttcggtattggttgcatttccttgctctaaccggggtagtatactcggtgtcgcggagcttatgcgtcgactagttttccagaggaaactagggtatacggggtaccgcttggcttgaacccgcgctatgatactctgtatcagatccaagtcggctaccagatgggcaaactgccgtattcatgcaacatcttccttgcgattattcaaaatgtactatttccaatcagcttaacgtattttgtctaagcgtggcctgtgaagaacggaggcaaaagtgtacgctgtgagatgggcccattatggaagtatcacaccattagcacacgatcatcatgcaaaacgtgctaaagacctggcaatgaagagtgattcagcatcaccactgcaagtattcgctctagattgccatctcaacttcaagaatagataagcctcctgatcaacaacctcctactaatattctcagaagtttagcattgcaaatgcgaacctaggcgaaattccaaaatagcagtaactcaaataactcgcatcctattaatccaccaactaagaaggccatgaatggagagcacaatgattgttgatccatacagtagtatacataactacacataaccatccaaacaacccccccgaaaagcgactcccaattcagtacaccatcacacaatgtaaatcccaaagcaattgtcccacatacccacctcacccaggagcccaagaccgggcaaagatatccggccgatactcactccccgaactcggcgaacttctccctcaaaccaccgtttctcaaagtctccctgactaagaccaataccgacagctattatcaacttccacttgtaattccgatcccgattcttctctgctatatcggaccgtaccatgacccgacaacggcaaaatagcctaagtggttacgtattcatgctaaataccggctaaggtagaatgggttccatgggatttcccgaaaagcatcaagatgacggcccgaggcggtcggtggagccgcggtgagttgtcgggcaatggatatgtcatggttatagcatttgtggaatatagctccgggttctggagataggtaaggggttatgtaggtttgccacgagtcttgacgtaaggttttcttttgaggctcctttcgagaatcaccgtggaaccttatactgggacttggtagggttgtgttgtgtttggttatttcctctagcggtgcttacgtgttgtttggttgtatagtttgaacggaaccgtgcttttgagctgggtaggtcctggtcattgtcggaagtttggttcaatcaatcacgctgttaaaattaagtttggttctcggagacatatactggtcagaacccatagaagttaagtacaatctgcaaaatccctcacatgatagtcgtcacaatctgtttcacaatatatacgtcaactgcccctgccatgctcatcagagacagcagggcttttcggtcctcgggtattttatcagagcttggcttctcgtagagctccaaaagaagaaccattagatgggctgatgtctggaatcgcatctgggaggtcagagttctctccatgtgccaatctgaacaatggctcccaaacggtgacagcccgcttggtgatatgcccattacccatctcgggaagatgataatagatcagtttatctgcggagcattccagcagttcgccagccatgcccgtttcatcttctaagaagatttgaactgcgtcgaggaccgtcttcatcggagtccggctaaaggtctccaggttagtgaccgctcaaacatgaataagaatacgaagagagggagatagagcggcgaaacggcttttgatgggcagaacctaccattccggtgccacagcctcaatcatctcaggaggaacaatgggcgtggcgacaatacccggcaagacacagttgatatggatattatccttggccttcaacactggcgcaacgccacgaacaaattggttgactgctgcctttgtcccgctgtattcgggatacgttctatgggggaaaatacccccgatactgccggtcaccacaatccttccgcccgcctcgggcctgttgtgccgcataaaatgcgttgccaatacagtgccatatacgacacctttgaaatttatatcggtgcaggagaggtccggctctggagggacgtcctcgacgcctttatcgcgccggttaaggagataaagcgaagactggtcacctacgccagcgttcgcgcacagtgcatcaattctcccccataaccggaaaacctttctaaaaacagcagcctggctctgatagtcgctgacatctgcttggtaaaatcgtgcgttctcacccaggctctgcacaagatcgtttccggcttgggctcggcggccaacacaggcgactttccatccacgtgaatgcaggtccctggcaatatcggctccaatgccagactagcagaagaaagatatggagtaagtgcgtctgccatcctttattgactaagtgaagtacttacagtcgcgcctgttacaatggcaactggaatattccttgcgttcattttcgttgtaggatatatgtgtgagcgacaaaaattgggaggaccagcattcagacattgtgccacatgctaagaaccactacttttagttaggactgcaagcgcacacaagtagcttcggagatattaattgattgctggctagcccatgcccattacccgcagtggagaaagagccctacgcgatgtgacttagtctctttccatagcgggtagtcagggggcgatgaaacaggagggggggggggaagcccagccaaagtacaagaaatcatataagaaacgttgctatagccgttattctggacagtcaatgccacactcttagcagtaaagtggcttgcgggtcaaagctcttccccgctgtcataaatggggtcctgtcaagcgtcgtccatctagcactcttgaaccgctaacggcggatgaaccgaagtagcgcacgatcagcactctcagacatacaaggagattgtcggctgattggcgggtcctttaccacatgtcccagcatgttcgatcagtggttgaaatggtgtgttcaggtttagagacggcatcattgctcttgaaagtattatcaagttcattggtgaggacaggtcaggccaccgcgctaagataccaagccactcccaacggtggtgaaccgtgtggcctagcggtgccttaaccctccataattagtcaagccgaaagtatattcattcggggtctcgttgcaattcgttcgaagcatgcatctcacagtttgtccatgcatcattagttcgacttgaaagaatggcccggcgggagtccttcgagttgggatccatagatggggtctagtacaaaataaggacgggtaacgtgacatgacatcccacccatcaggacaggagtcgagtcgctgggtactccgtctgtatatccaagctacacttcattctccatattgacttctagtccgattttcaatatgagcatccagcattatccttacattgaactaataaagcgaacaacttaatgattgaatgcaacatccccgctacatattaaaacatatatcacaaggggacggtgggcatcgttgtctccaccagtaagtctccttccataaatgtatacatgtatcatcgttggctctcgtatttgctggtgtcataagcaaccagcctgtttgttatgatgcatccgattacatacaaacaaacgtacgaaactcacaccgatagttcgcccagggtgcctgattttagcattcgtgaccagtggttcactagcggaattcgttccgaaccaggttatcaccaatacatatcatagcgtgggttaaattggacatttgttggccccaaagggggtctctggtggcactgatctcaggtttgtatgatgcgatatactgcgatgatttgttcctttcacaatgacaaataacatgccttagaaccctggtctggtaagagcacgctgggaaaaatacgagatgctgtgcagtcctagttgctataaactcgattgaagacggccatcgttgcagcagtcgctattcctccagcgatataaccatctacttttggtgggtcgacagtagccgattttcagtcgtgactggagccccctggtcgagtttccggccccctgaaagtgatgtactttgtcaaatagcttccacaaagacgaggatgggcctgaaaattttgagttcttggtagtggcggtcaatgaaacacggatatcttaacgatgatatctgagagatagaaactagtcaccgctaatctcgtctaggacctggaataaaatctggttttgcactctgcatccttcgtcagttgtaaggccattgctaaaacccgcccagagcttcttctgaatctctgccatatccaagccacgtctgttatgttgcttgatcagctcttccgcaattgcgcagagagtcgtattgagaacatcgtagctagtgggtcttgaacccgctgctgtatcaggaagacaaccacaaatggactgacgttgattgggtacttgttgatttaaagtcacctgaggctcggttttttgagtgagtcttgtagcattctgagaaacgtctgtctttgataagccgcctaagtcctctgcgtggggagccttggaatccgtctggcacctaggtaaggaaggcggactccgacaattcttctgatgagtttgcacgtctagggactgtcttagagcgggaatggcaaccttctgagccgtgtttgggtcctcaactgcctgaacgtattctgcaatgatttcggcaggtatctccaagcgagaaaaaagaagtctcaagcccctgttttcagcttccagcttctgaacagccagtctatgttcaacatctttttgatgggcttgttcttggagagctaccagcttctgctccaagccacggatgtgctcctgcttcctagcacggctcttgcgctggttttctcgaactcgagcaagtttatcaattttctagcaacggggtcagacaactcagtcactgactgggcgacactagatctccggggcttcaaccttttgattaacattatccatgactcatttgaagcagctaagctgtaatgttggactagatatcatgcctttgaggaaagaatattacagtgctgaatggttccacagacaggagactttacggcaaaaagcccatatcgacacgtgacagcggacggcgtaatcgcaaataaattagcttcagggtccacccgaccggaacggtagttaaaataagatctccctcggcacatcatttctttgaccagatcagggaaaggcacttcggcttgcttaaagtgattaagacaatgagctatcactgggtccagtggagcagcacatcataatagtggtgttttgccgcagcttgcggcagaaaatccccaaccaagtggagatgaaggtcaatagctggttcgaaccactgttccctccgtcgaatgcgtaacaagatccataagtcattcgagttaaccaacactcaaatggggaatcgaatcgggaggagtggcgccttctgcacaacgtcattagccgtcagttcgctgcttgcttattcattcaagggcgaacaatagtcgcactactccttcctctttctcaccgattcctagacggcttctgtctcacgctttctaagctcgtattgactgcaaattcactgtttgggcgggtgtcactttcatgtgtactaaaccaccgcgattctcttgtagctatggtttctacgcgacaccatccccgcgactttccgcctccatcaacgggaaaggcctcctcgccatctaacaacagcaatggcactacgaatagatgggtacacgccccatcgactgcgatcatcatttggctcgtcgtgtcagtcccggtagttatctgggatgcaggctatgtgttgctccggccgcatagcatgccaggcaacaaattgcatttccctatctggattccttatgcgcggtatggagcaatcgactatatctacggctggccggcgttcaatgctcggaacggtttcccagcagcacaaacagtcttgaaccttgtggaatgtatcgggtacatctattacctctggatggtgtataggcacggagtctcatcgtcgggcggtcgcgggcagcgcaaaactaaaaaggggcttatgtggatgttgaggaccgagaaggtggtctctggacgaactggagccactgcccttctagtcgcgtacagcgcatctcttgcgactctcagcaagactgttctctactgtgagttttgaagataagagtcgcctatatcaggtacttgtgcttacaaggatcctagtgctgaacgaggttttctccggctttgataatataggacataacgatgctataactctgatctctctgtggattataccaaagtaagctttctgtgtcattatctcacttcgtttgcttataggtgggccagtggtctttggattattttccctggttacaatagttatatcttgggcgcggaaatcgtggcttcccttgaaagcgccgtgccacgccagcgtgttggacgatctaagttgtagtaggatccgttgtcggaacggcatttatgcgggggactgttacatgacatgccacgcgtggaacatgaatcgcagccgaccaaagcatctttggatgtgattgttcgacgagtgatctagtatggcgctgacgtttaatcttagatatgcacagtcggattgcgaatgtaatagaaagagttctgcaacagggtccgggcgaggatcacgctaatgtcaagctcagcacccttttaagtattaagtatatcccccagggtggatgactatcttgccgaatacggagtatgttcgaagtatagtgtggggtatccacctggcacagtagataatggaccgtaatgtcaccgcaagggttttataaccattgtcgaaggaggtgggaaatgtcccggactactgaaggagtttgtacatgtcaccgcctgaattgtcaggcgaccaatccatcattagatagtcgatgatagattcaaatagtagcggtagtagtataaggtgaggatccacaaccaacgattccgttttcatatttgaactatttgaagtaaaaaaaaaagggagaagaagtcaccaaccaatatgatacagaggaaccattttcctgggacccgatccaaagaatgtttggttcacccaatgatcgtctccgcatataactgaaaatgaccctcagaagacggggttaagacgcccattaaatccagattcgatgattcctcgcgactcttagctgcattaagcctggtaccaagaggagtttagtctccaactctttctttctcctccgctttttcgtttgactctctttacagcaaaataatccctcaacctctggcgaacgcccgtagtgagcccgagttagttgcggacagaactcggggccgtcgccaacaacattaataatccccagcatgacgacggccagcaatgccaagccgccaccgaccgaccctcaatcttccccatacccaccagaagcgaccgcctcatcccgcaattttgtcccgtcattctcccgagaccaagacgagatctcttggacctctccccaatcgactttctccggtataccgaacgatgacccgcgcctggctcttggggtacctccacccgtcatgatcccgcccgagtccgacgaatcccccttggcctcctccgcaggcctcaccttggggcacgacgatatcgcccttcccgacgatatcgacacgcacagccgagccagttcacgcgaccccgggagcgtccaaaccggaggcgatatcagtactattctagagggcggatacgaccatcaccccgacgacgggaaaggagattccgtgaatggtgagcaaagaaacgaaaaaccagcgtggagcgaaatgaagacaaaggctgggaaggagcgaaagcgcctccccttggcgtgtatcgcatgtaggaggaaaaagattcgatgttcgggcgagaagcccgcgtgcaaacactgctcgcgctcgcggattccctgcgtatataaagtcaccacccggaaggcagcgcctcggacagattatatggcaatgctagataaacggctgaagagaatggaagatcgcgttattaagaccatcccgaaggaagagacgagggatatggcagccatcggacgatccgtggttcggcctccccaaccagggcaggcctcgaagagccagaagaagcggtcagccgacgaagcttttgcgaatgagatggacgagtgggctcgtggagagcgcaaagcttcactggatatattcccaatgcgccgggaaagtaagattaacgatgtaactggtttgatgactgaaggggcagaatttttaccctcgttagagattcaagaacatctagcggaagttttctttgattgtgtctatgggcagtcttacctcctgctccacaaacccagctttatgcgccgattgaaggccaggactgttccaccagctttgatcctggctgtttgcgccgtatcggctcgattttcaactcatccacaacttaactccgaaccgccttttctacgcggagagaattgggcaaacccagccgctgcaatagctttaagccgccacgacgcccccaacattactattctgaccgtcttcttgctgctgggtcttcatgagtttggaacttgccatggtggtcgaagttggtctttcgggggtcaggcgttgcggatggcatacgctcttcaactgcataatgaactcgatgaagacccgctattgagccagaccaatggtggcgggtcccagctcagcttcactgatcgggagattagaagacgtaccatgtgggcgtgcttcatgatggaccgttataactcgtctggaagtcaacgtccacctattggaaacgaaaaatttatacagatacaactgccgatcaaagagtcgcattttcagatggaaatcccgggaccaacggaggacctggatggaaatgttcccaatccagttccggaagacgttggccagctgtcaaacgcgaaggacaacatgggagtgtctgcctatataattcgcgccatagtattatgggggcgtatcgtggactatctgaatctaggaggaaagaagaaggatgttcatccactgtggtcacccgagtcggggtatacgcgcctcaaacgacagattgaggagttttctgcatctcttccaagccatttagcattcacttatgagaacctccagattcatgcggctgacaggatcgccaaccagtttctctttctgcatataatcattcatcagaacatgctattcttaaaccagtttgccattcctttatcaccgggagggcgccccccgcgggatatgcccaaggctttcttgagcaacgctggacgggccgcggtagaggcggcccaccatatctctgtgctgatcgatcgcgcttcagcataccctcttaccgttccctttgctggatattgtgcatactcagccagcacagtacatatctggggtatcttttccaagaattcccagctcgaggctcggtcaaaggaaaacctacggcatacttatagatatctaaacaagatgaagaaatattggggtatgttccattacatggtggaaagcgctaaggatcgataccggcagtttgcagatgctgcgattaaggggtcggttgtcacccagaacggcagtcagatcagcgcaatgtttcagtatggtgactggttcgacaagtatcctcatggtgtgtcgaggatgcattgggaggacccgaacgctcaaaagaagaataagaccgacgaagccgtgatgagccagaagcccgaccttcaaagcgtcgaggacttctttgccagtctatcccctacaccacagcccagcgtgtcaggccgtcagcattccaagaaggacagcagaggcgaaagtctgtctgacatgggtcagccaacctctcaacccatggttgacataaacactccagggatgatgaacacaccgggagccgggttcccgcagcccgcactgttcaaccaagctcgtgggcaactgtacggccagtatccgttcgacttccccgttccagccgaccaactaccccaactcgaccgacagtttgtttacggctcctttggcggtctcgatccctccaccaatttcatgccatcggaaaatccgcccatatccaccgtaaacggctcagagccctccccagcaacagccccagacaactccgccatcttcccaggccaactagaccccaacgcccccgccggggtaggcgagtactatcaaccaagcgcctggttcctccccttcaacctagaccccgtcagcgcaggcgtcggcctcgacccaagccccgcacaagtccccggcagcggaaccccggatatgtccaccttcaatggcgggaacatgcccatgggcacatttgacatgggaatggcgagcgtgaatcgaggaccccagatgaacgaataacggagggtaccaacggcgcttgatattagacttaacggcggcatttttcttttttcttggggggtttttcttttggcttttcttgcgggatcctcttggcgagtttttgtaagggttggtttggcaaaaagagatggttggagttttgattatgatctcttgatatctgtacggtggtcttatgtgtatattttcctggggtttagggaatattaatctcttctgatggggtgggtttcttttgttggttttataacttggattagggtcatggcaggtggttcagatataaggtgtcatttggggataagtatttatcctatgccgagtagtaaagaacattatctagtacatcccacatctagaactggaaatacaaagaaaagaagactgttccttatctgtaaaagccgagactaattatacaataggccaacaggcgcaaacaaaaacaaaacaaaaataagtgcatcatccgtgaatcgaacacgggcctcatcgatggcaacgatgaattctaccactagaccaatgatgctagttcatatctttttgataaaatacttaataaataatccaagatctattgccaaaacatcataacgactggtccattactgactactggaccgaaagactgacccggaatatcctaaacaattcatgatccgctacattggggaagtaagatagtattggtgctaatgatagtctgttgtagatacataaggttgtcaggtgcattattagttgtattccaaggctacgtactccgtagtttgggatgtgcggtcttcggatacaatattttacactgtatctactcagtaaatgactctgtatactctgtacaccaggatcgactccataattcaatatgagaccttgtcggcagagggaatgctagagcgattatcatatccgtgtttggaagcgaaggaatccatagcgccaatgacccgtattcgtaacagtccaggaaaatcttacatccaacatgtaatacagcgaaatcagacatgacaatcatgtaacggaacagacacagcagaaagcaaagcaaggggagatgcgacgatcataaattcttaatcttcccattcttcgtccagttgatctatcagtcgattttcggcatcgacatctcttccagaatttctccgcccgccgatcgcgccgatgaacccgccgcgctggctgccgctgcgggtgtggccgagagccggcgatcgtttgaaccggaacacgcggcctagggaggaaccgagaatggtgaacatgtcctagttacgcttgctggttagcgatggttcccaagggcgccctggtttaggcatatgggaaaggcacaagtggaaggaacccggctaaacaatagaactatataatgaagtcgttgatgtccaacattcaagggctaatcacaagagcagatcctgctgctgtacacagaaaaccacggtttacccatgttcaacataggtctaaatgattatatagcaaacaagagataggaagaacatagaccagatgctaaaagtaccgactccctcgatgtaattgagctctagaccagccaaagcggcattcaatccatcctcgaaattggtagcttcgcattgttgaactccttgtaggaacctcgatcatggcggcgcgctctggactgagcccgccgaaacggtatcaatgcgagtatacttacttttacaaagtcgaacatgcccgcccagagactgtagtttgggcactgtctccaaccgcgttggtgcatgactgtccgctgataagcgcagccaccaacaaggtacgcgacgacggcgatcaatgcactacagaacggtgttaatcctttctgatttcttccatgtaaggcctatcggataggtactcacatcacaccgaatacaccggctgggccaaggccttggccgtcggccggggcgacggcaccacaggcggcagagcttcggacttcaaagaagtatgtgcactggtccatagtgccaacaaaggatgcggtcgcctgatgtgctggagcgtcgcgatcgcaaaggaacgacataattgtcgatttggtgcgcgaggcatttccgataagttccccagcacacggtgagccatcagtgtaattcagaaccagcttgcggccccggaaaaatggctcagacgcttgttgcctaagagcaagttagcccgtgtcccctctagtttagacggtcacaacccgcatacaacgtacccgatagaatagaccttgccctccttctcataatatgcactgacattctgccaccttgcgcggtcgacccccaccacatctttaatattctccaccaccggagcgcaaacgtttatcgtgaagtttgcatggtagtcatgacccttggcatgccagctctcatcgcggacgtttccacgaagcttttcgtccttcgtcttcggtggggatagagagattgaattcaggtcgtagtagaaaccggtagtcggggagcgtgccacacagggcggtaaggcatttgagccttttgaatccgaggcagcatagacggaagcatggggtgcggagagaaggaggaggaatccaagcaacgacgtagccagcgacttcatgatgggagataaatcccgcagggaggcgggatgactagcgataacaatagtataagaaaaggaccgagatcgccgaagacaaatttggcaaggaaagaaagtccggtgagatgtggataaatgggaaagaatgaattacgaaagagggtgattaacggtgggagagagactgagagaggaaccgaggaaggagacgtaagatgttgaatctgtggtggttctccaacaatagacttgaaactgcggagacaacaaaagcaaaaggaacaaaaggaacaaaacgcaaaaagtgtccgcggctcccgtcggccaccaatcatccggctcagacgattaaccttcttttttcaagatacactctcctatttacagataaataccttctacccagccattgaagaagcccacagctttctacctcttctacagttctatctgtgggtttctttggcctccgcgcgaccggtcaacaactctgcgtcactgttaaacccccgtggaccccccgaatttcagtcgcatcatggcgccgaagaagaattccaagaccaaagtcccgatacagcccgttcccgaaaaacggggttatgaattcttaggcccgtatgttgtttcaagagtgtcgcagccatgaacctaagaattgaccttttaacagtcccggcgcgtttgcctttgtgacctgccttccgactctcatctacgctttcaccttcttatgtaacgatgtttccggctgccctgctccctcgctgctcaatccgtcgaccttgtccctggaccagttaaaggcggaggttggttggccccaagatggccttaacgggttcttcgacgctcgcgtgaccctgtgggtgttgagctattacctcctcagcctggtcttgtacgtgttcctacctggcgaggaggtcgagggtacggaattggcctgcacaggaaggcttcgatacaagttcaacggtatggatatggtgttggatgcttgaatgctatcggctgacccattgacagctttcccctccgccgtgttgatcctctccggtttggctctgggcacatacgtctacggtgcggacttcgccgtgtggacttttctttgggataattacgtgcaggtcattacggcaaacttggtgatttgcacagcgatcgcggtctttgtttatgtgaggagcttctccattcccgcgcctggtcaactcaaccccgaacttagacaattggcaccaggtggccattctggcaatgccctgtatgatttcttcatcggccgagaactcaatcctcgagtgcagttgcctattcccttcgtcagcgaagcttcacggacgattgacataaaagtatggtgtgagatgcggcccggtttgcttgggtggaacatcctgaacctgtccaacattgcccgccagtacagaacgtacggctatgttacggactcgatcgttctttccaccgcattccagctcttctatgttctggatggtctgtacatggaaccagctgtcctaaccacgatggacgtgatcatggatggactgggtttcatgctctctttcggtgacatggtgtgggtcccgttcgtctacaatttccaaactaggtatctcgcggttcaccccgtagagttgggtctgaagggcatcctgcttatcttggccgtaactggcgtgggatactcgattttccgtggggccaacaaccagaagaaccgcttccggacggaccccaatgacccccgtgtgaagcatatcaaatatattgagacagccagtggatccaagctgatgacttccggatggtggggcatggcgcgtcatatcaattacttgggcgactggctgatgtcgtgggcatattcactgcccactggatttgccggctatactcttatcgaaagcatcaaccagactggcgacgtgcagaagcgagttgtgcagactcctgaggtccgtggctggggaatgatttgcacctacttcttcttgatttatttcggcgtcctgcttatccatcgcgaaagacgcgacgaagaaaagtgcaagaggaagtacggtgcggattgggaccgctatacgtctcttgtccgcagccgcatcgtacctggtatctactagtcggactgtgtactctatgctggggttttcctagtgttgtttccgtttacttagaccaaaagttcgggatatgttcggattagatcctggacccatacaggtcgttacgttctatgtattcataactattactttttaatatgtacattaactagagccaggtcatgatattcattgccataaaatgcatcaattgggacaacgctttcgcttcttgggatcaatcagcacctccaacccccaattctcgtcccctagattggggatccatccactcaacactcttctagcctctcgtatggcacttctccgtgcttcgagtgactcggtcagaaccgtaggctctttcttgaattcccgatatgtcgaggcatcagcaatccgctttgtcacatccaattccacggactgcctttcttccacaccgatctcggtgccagtttcttgatcatgatcatccacacaagattgcacaatctctttagataggccccatagcctcgcccttgacaacgcagaagcgccgcgtgccaagggctccgacgcccgattcccctgtttcaccccattgataatggtctcatacaaacccgtccgagaaccagctaatttaggcaacgacttggcaccattatccaccacactaggaaccagcacagacgaagccgccgcccaaacagcagaaatgactgcaggtttagttctccttgaagcagacgctcccatcggatccgacttcccaaacgcccaaagctcctcaacgagcccagtaggcaccgacaggaccctaaacggtcgaaaacgccatccataccctcgctcttccactcccttcttaccaccaggggaccaaaaccttcccttaagctctcgcatcctcccatcctccccgaaacacctctcacacccgacccgactaatctcctcctcaggcataacaaccccctcgagataggcattctccgtcgtcgccacaagcaaactactctcaaacgataacagcgacgaaacctgcctcagagccaacttatccgaacacgacttactccgcgtagtttctgcatccgctcgagatggcttccgccgcacaatccccagtcgtgagaaatgcgccctgccgtctagaagttccccatctccgccgtctggcgttgtgggaacttcccacggagtcgggtcctcctgcgctgccatgcagagttccatgcttgcgtctccgcatggcgcacaggtgcagtacatgtagattttcacatctgggttgagttcaaatgggggtagtgttatcgttgagtcatcgggatcttgtcgtcgtcgtcggatatatggagaataagcctctttctctttctctttctctttctctttctctttttctttctctttttctttctctttcttctcattagacgtatcatcctcagatgaggacctcaggctccgtccctgggccagaaacccccggcactcggataaaagccagtgattaaatgcccgaagcgcgaggacctcagcgtgccagtcatggagcactagtcctttacttttggggacttgggatgctgagagacattttgcgccggatctgttcatcgttagttgtagttctgcctttcttcttcttcttcttcttcttcttcttcttttttctttcttgatcagtaagatagtaagagaagagtaaaacatacgtaacagccacacaagtcaattcttcatcaggtgtatattctcctaataaaagtcagtattattagattcaccatttctcacattctatacaatatacaccacaaatcaagtacagagaataaagcaccatgacataccctcaccccctcgacaaaaaagtataagagaaaaagactacatacccttcacaacaacaatccccgacataggaatccactccctcgtcccatcagaccgaatactaggcttactccgagcaggcaagccatcaaaatgcgcatggactaaactcgcaattcgacttgccaacggagttttcgtttctgactctcccatatccgaattcggatccagattctattactctatttccaaagaagaaagaaaaagaaaatagacactgttatcccacaagaaaccacaagatacaataccccacaaaatctcttatatacatatatcacgtgatcacaaatgtacaacataatctcgataaagaatcgccgataaccaacccaacctaccaaatccaaagccaacccccgagaaaccagaacactaccaccacacctccaaatataaaaacagcagcgcagaaatcctaccaaaatggccgacaagctccgcacactccagaacctcgaggccatgcaggctcggtacgtaggtacgggtcacgcagacacgaccaagtacgaatggacatcgaacatcatccgtgacagctacgcttcgtatatcggacatccgccgatgttgtcgtatatggctgttggaatgggggagccgaaggagaaggttcgggctatgtttattgagaagatggttaggggggctgggaatccgcctgaggtgagttttctctttctctttttcttttttgggggtgtataagggtggcttgtgtgtatatgtgagtgagtgagtgctgattgttgctgtatatagacgcaggagtgaatggcttgggttttatgggtgactgtctgttgtgatcttgttataattgttggttgtggtgtcgaggtatattattgaccacactgcattcgctgagacggggactctgcttcatggcttgtgggttgatctcgatatcagcgctggtgttggcattgagtcatgggtactgcttgatgccggtgaaatgcggtccgttcactgttgcccttgatcgctgggagttatggagtattttatctagacggctcggcgggattacctgggtttatgagttgtatgctatgagctgacttattgctggttgattaccatgtactataatgattcaaggacgtcggttgcatgatctttgtgaaataactgagtatgcatccatagtgtccgaataaacaactcgtatacatatgctaaaacatggccatgctagatcatcagtataccagaaactattattacaagtcaagcttcaagcatcacttttctttccagctgccgccgccaaattcgtgttctctgtttgcaacgacgcgatcagctcgagccattgtcgtcgctcattcctaagccgctcgagctctttcctcaaatgctcattctcatggcgcaaaatatcattctccgttcgagacttcgtcttttcttcctgttctgcttgctttcgctgtttagactcaatctttgacgcctccttgagctgatgcttctcgatcttcccaagctgcttgaggagcttggattcctcgctgaataagccagaagcgaccttgtgcatctttgccgggtcgcggctgtttgcaggatgggctaggttattactgctcgacgaacggctttcgggtgttttccgctggttgctgctgcctgcactggtgctcaattgatcattgctggcgtcggcggctgccaaagcagctgcagatgctttgtctctcttgaacccttcttcgcgggacggtagatggagggatctgatgtcttctcgtactcggtctagttgtgcctcgacttcacgcttgcgctgggctagtttagccagctgtttctcatgcgaggttagcttgccgtccttcttctcgatcttcatcaagtccaccggaggaatgtcgtggtgcccagcttcgatgggagtggcgaggccggagtttatcgaggacgctttatcctgtgaaagttgagatctcgtatcatccttgtctctttctgttgcatccctttgcgggacggggtccccactagacctgggtgctctctctccatcctccgtagtaacatcagacatatctcctgatggatggtgtgagtgacctggtatatagtccagcacagcctgaggggcgtatcgctccaacccagcgttgagtagataggcaaagctggcaatgagaccatgatgttccacctcggtatccgaaaattcggaatcgctgatctcactatcttcatcttcctgcacgccagccgtatgtagactgtttctccgtctcttgtggcgaccgtcgtccatacctggctcagaaaccgagttgggatcgcgacaagcccagtccagaaacttgaccgcatccgagcagatactcttaggcgtgcccttctcaaccatccaccgaggtatattacctccggggtcactccttgtcaccataatccactcgacagggttcgtctcctcctcagcaccactcccctgcttctctttcgaagccgcctcaatcaccccattactagacccctcaaccacaccctgcgcatcaccgccacctcccctcttaaccggaatctccctaataaactcaacagactcgtactgcccccgaatatacccctgacaaggcggcgcatcagcatgctcaacaggcttcgaaaccatcatccaaaaccgtcccccctcctcaaccccaacctcccaactaacaatcaaggaaacaaaatccctcggcgtcgtgggcttcggaaactgcgccgaaacatgaaaaacagttacatgagccaacaccttctccccactctcatccttcacctcaatcgtctcgacctgcttctcagccccaatgccgcggaccgactggtcaggcgtctggccgtgcttcatgcgctcgcgattcgccttcagcgtctcggtcatctcactcgagagcttcgcctgccatgtggagaaggggaggccctcgtggacgctgcgacgaccgaaccagtggcctttgccgtcgttgccggggagtttgtggattaaaaggtcgagggggttgtctcttgtgctggagactttgatgggtttgctccattgttgttggagggattggagggttgggtctgtggtgttgagtctggcgggggagggtttgacttgatgggtggtagtggtagtagttgctggagggggttctgggacggagttgacgatgaggtgggctttcgtggagaggtcgttgatgtaggtgcggagggaggaggggtctgtgggcacctcgtcccaggttgttggggcgagacattcaagggcttcttggagggcggccatttggtttcttctgtggtcgattactggtggaggtctggagtttgggatggcgtgggaatgtatgtatcaattgatgtactgtcagtccggcgggtaggctgtctatcgaggttgatgccagctcagttgtgacgcgggtcgtcaccaacaataatgattaattagatcattaaatggcaattcgatcggtcgatatacaaataaatgcaagtgaaacgcaaaacctatgcagcctgttcaaggaaatctccgttatcccaggcagcgaaagaccggagttcgagtttccccagacactgacgtcattggttctcggcccttatgccaagaaaagttcatggccagatttggtattcttatgattatcactatgatgatgattatgatgattgctgttatgatcatattattaatactcgtatagcttattcgtaggatattatgtctaccaaaaaaaaaataaaaaataaaaccacttctagtcctgcaatgtttcaaattatgttatccagactagttacatgagtgatcaaggatcaatgcatacgacaataacgagagtcaaggacaaaagaacagaacgaggaacccgcctcagcaagtgcaagactataccagcatccgattctcgtccctcacctctcactcaatgagagggcttggaacgagcttatccaggtattcagaacccagcctggaagataggagatgaccctatagacgaacacagtccacatcgcgccaacaggcaaagggaatttggttcactcggaggaccgagtcccatcaaggtcacagacccgacggttctcagctacaccgggcgcctgtcacggacagccttcccgagcccacgagtaatccagcctccagtgttctatcgtcgccaacatggtctgtgttgccagaaataactgcgagcgtcaagataacacgacccgcagcgccgcaatcaatacctcttcaatctgacctagcagatgaccagtccggtagcctgtaccagaaagaggatgtccaggacagagaaggaggggtctaggcccagccataacaccatcgatcaagctatcctggacggatgcggcgacgaaaggaaacagagcgagcgtttctcatccaaatcatatcccaagccgcgaggctaaccaggtctttcatgacatataaaacgggatctgaacaatgggatattctcataaacaaaacaaaacagatagccgacccgccgcttcttcatgcaagagaaaaaaaccgaaagaatcaaggagagacgaaacgctaacgctggctcgaaaaaagaaacaaacaaacacgaaagagtagtcacaatagcaaagagagaagatattatgttctttgatggtcatgcaaacgaagtggagtatcatggtcgcagaatcgtcaatggtaacgccgtcactgatgccaattagtctgttgtctgtatagcggggatattgctcccggtcgttcttgtgggtgtgtctcgggctcgaagggtacaaacgagctaggtagagcttttcgacagggactccgggatctaaaccaaaatacgcgaagtcagggagaccatcaacgtcaagtgtctggttccatgggcgtattacatggttgtcccgtacggcagcgcaaagtcttggtatcggtccccccacccaaatccgatcatattcgccgctgtgctgcagggctgtaccaacatgcttggcaatgggagcgcggcaagtgcggcggacgtggcagcggtgctataatactgcgtcgcattgtaaggcgaagtagtgtatggttggctgtaagacggtgtcggagaagcatacgagaactcattcatgttgttcatgctggtccatatattcggattagaatctcctgtgctggccgtggctgggctggatggcagtactttccacgtgtccatcgacacaggctgctgcatagggtcgtgccaccatgtctccggaccagtggaactggggagaacaggtgtcgaacgaagtacatcgaccacgcgtggaggtggaggaagcaacggaacgaacaggctggtgatcgcggactttgcttcctcacttcggcccccaagcagctcacctgcaccgtcctcctccagcccttcaagcgcctgcgcgctggcgcggtagacgaacttgttggcagcctggacaaactcctcctgtaatttcttcaactggctctccttctcggaccagtcccaggtactcgcggcagtgtcaacggagtaaacctccttgtggaagtcgaccaaagcttcgattgtttccggtgtcagtttgaatgcgacctcatttcgagacaccatgtcaacatgcaccacgtatgcctcgacatgaatcatctggtagttgaagaatgcctccacccaggggttctcgtcccttcggagctctgcttcgggggccttggggaacatcatggagcacagggtccagatagcgtttggtgaggacaaggtttccgtcagacacttcgtatgttgcgtcacattgtttaaaggtcgcttgactcggctgactcgtttcaatgtcgccgtcagccatggttcgattttggtgttcaacaccacattcggtgaagaccgcggcgcaaaggcagcggccgacgacggtagcaggactgttggcattgcgactcagcgataatgatactatattgaaaaagaaggaacgagaaattgaaagagctatagaaaagaaataaataaagaaggcacaacgttcataaaggcgacatccgcccacagtaagtggttctccgatatagtagatggttccagcggtaaggtgggatcactagttggaagcggtctctagtacttgacagacgaaaaaatcggactagcgcctggccgggtagatggagaccgtctttaaagatatatagtaaagaactccacagcactggccacagtagagtggaataggaagatatagtaagtagagaggtccaaattactgtgtgggcgaacgcgcaaaagagaagagaaaatgaccaaagtaaagaatgtaaatgaaagaaagtttttttttagagcggtagtgagaatggaggggaagaaaaggcgagacgcagaggtcgagagaagagagacacagagagggcgcgaagagagaacagtcgaggaggggcgggagagggctgacccgaaagggaaagagaagaggatgaccgtcggtgattctgaacacaagagagatcagagaaaaaaataataattatagggtgtattaatggcgttgcttttcaaacttattatacagggtctcactaagggcaaaaaaaaagtcagaaataaatagaataaaaaaagatacggagtcgagtaactctctatcataaaaaaatgacaccagaaaaaaaaactggatcaccactactccgtaatccgttgatatactttgcctacagaaatacaagagcccttttttcgtttcggtttaccctacgactgcttaccagctctgagcgcatagatactatggatgcccggcgactttttctcatgcagacatggaatcccgatcgtatggaacgagttcatacatacacacagaagcacaaaatttagccactctccgggttcaccgtccgatctcggctggtaccctccttcgctggagtttagggcgttagcagcatgcatgtgtccaaaatcgtcgtaaaaagtggagcctggcagttaagagttgatggatggattgacccagaaacatgtcaatccaagttattttacagtaggtaatctattcagtaagatacctctcagccctcatgggctctcataacgacatccagccagaagacccttttcagggcttgatccgaagcgccaaaagatacaatgtggctgaggcgactacgacctgatttggggagtttcgagtggttcccaagtctgtcagacgattgggactcgcatctcgtttccacccaagtcttggctggaaagtctgtttttaattgttattttttatttattcttgtatttattttttaatctcttatacgacccgtgaaggatataggaaccgaccaggtcagtatccagtatacattgtaaagtgtgtcatagatcaatggatgggtccaatcgaagagtaaaggtgtgtgactgtacaatactctatgtgtatgcatgtatgtatgattggaattctatcaagagaggaagtatgtccggatgcggcctgcttcccaacgccggaaacgtcacacagatacgacatccgacatgctccaggattaaattctgaaagacattgtagagaataatgttgcaacccttgggctccaaataaaccatcccgatctgggctgtcgctaccaccctcttggtagaagttgcagatcgtcgcttgggtacagaagtagggtatggtgcgatgtatgtatgtatgaattcatgtatcctgtgggtatcctgtacatacatacagacatacagagtacatacgaggtatggacattgaaagtgaaacctgaatgtggtaaagaaaatataccaatcgcaagagggttggctaagccccaatgcagacccactctttgggtaaaatgcatctttgttcagatctgactaaggactatgtaacggtcaccagcatacgatatcatgttccagagaggggattattctggtcgtccagcaccaacgtctgaaagtgattctatcagagaagaacacaaacaagattcatatcgagtcatctcctgaaccctacctgtttcagctgtctctgaacattccactgaaagaaactcggcatttcccaccgatgaccaccccacttccctcttggtgtgtgaagatcatccgatactcgttttggtgagcagtctctgccaccggtggatacaatttagtcgcttatgctcagctgggatgtgcacttccaagtatagcccttctgctgaaatttaaacctaatagtacatccgaaggaaagcgttggaaatgacgcaacgcccatagagtcatacaagagaaagaaaagagaaagaaaagagaaagaaaagagaaagaaaagagaaagaaaagagaaagaaaagagaaaaagaagggacaagtaacattgacgattaagatatgtggaaataaagagagacaaaagaaaaaagtaaacaagtaccaattataatactcggcgatggttaagagaactgaagggggaagcggagaaattcgccgaaaagtctatctgcaacctgttacagccatgcattagggtttgtttcttaccctcacccaaagtcagcctttcatacagtatataagattcactttgaataaagcaagaaagtaagaaaaaaaatatcagaagaaaaagaagaaaaagaacttgaatctgctgcaacaaaaacataatgacgtcgtctccggaccaaaagggcccgaagaatgactccacaaagctttgaccagtacgcacaacaattgcccaaaggcctaacacgtactgtacccaaagtacatgagtgtagattcacatagcggacatatgtacatgcacccgtgaacactgtacagagtatcttaacttgcagactgcaatactgcagtgatcctagacgctctacagtagtctactttgcctactgcaactcaaccatgggagactcgtgtatcaaaccgtggttctaggcgaatccaaagctatgcccctcaacctaattcccaaacaatcatgaatgaaatgacctctctatctgtgctacacggcggggtgagccctgccatatccagtagcttaaaacagccctttgatccttttctctctttctttgtccctccccattttcccaccttccaccttgtctcgttccacatatgacgtgcaatgaggaaaggaaagggtgaacagcatattaggaaaattaatcgacagtgaaaataaaaacaatttcctagtatctcacttgatgaatcgcgggtcgagtcctcgtggggcgagctaaagggcctaaaaaatcttgggaagctggaagggtgcctgttcaggcctcagattcgctgatggcgagagagcccggctcactgtgctgcacctgagatccctgttacgacctaccattggactgagcttcgtcggccgtcgtctctagactttaccagaagtggaagtcattcgaactaccgtctagactcgtaagatgcgattccgttacaagcacgggaggaaaaggggggttgtccggttgcacttccatcagttctctttttttccgatctgcaacccatgctttacttgcgcttttccctaggtctgtactgcactacatacctattaggtagggctcgtccggttagttcgtccgcctgcagtaggcagagatgcaaggcccgggttggtaggtatgtaggtatcctggaggccgggtagtgctcctttcagtcaatagaccccatgatctgctgcacgcggacgccgaaacgtctgggggtagttgggatccggccacaccgggttaggttgaatagggttgagaggaaaaatttctgatatcggccatcaaatcaacccaccaacctgtcgtaccccacagacgacttaacaggataggcagaaacattgcacttgaatggcgatagtttgagatcggataatgacatactgctacggtatcagcacgcgcccagcaatgggttcgatgcacacagagcactcacaggttgtggcgaaaagttgattgatgatgccagaacgtttcgcattctcggttggaatcggcatccgacaggagcagcctaggaagtaaataactcttgtgcagcaaggcaaccagcgtcgtcagctcgggccacagatttgcgacacactgtaactaaatttgaccgttatttgtcgcccctccgtagcaaagtagggcgtagtgcctataaagttgattgactatgattcgggagaattaacccccaatggcaagagtgttacctctgtaagtgcgtacaagcaccacatatgacctggtagcgactaaagatatcccttcttcggagatgaccgactgctgcgcctctgtcacgttgccacatcagccacatcggtattgtggcggagtttctgcagtacaattatgacataagagtggtcaagcatagacaaggaaacaagaagaaaaggaaattagagagaaagacactagaacatttggcaggataatttaaggatacacaattctagtatcatactcgtggtcgtgtgttgattgtttttttccaaccctcagtatgaagaacatataccgagtacgaagtactacatacggtaacatacatcaacaaccctgatacttcatgtaatggaaaacagcaggagctcgcatgtgataggcttagaaagcccctgatatgctcgccaatcattaaatgtatagtggcatttcatgcaacccctggatcgcttagaagtactttcctggtctcgcaattcaattagatgcacaagattctggagcaaccaccatctcaacctatacttattgcgagacttgaacatacgccacctatctctcggcttagctggactagtccgagtagatcaccactcgcagatagacatgtatcactgcgagctgcctagagctgatgaaagtttcttccagtcctcacaacgccttggttgtcccttcaaggtaacgggtaaatttcagcgtgacgttttcggtaaattctttagagattatggtgtcagtatagcgatgcagttcgttacgctgcacatgaagctgagctctcgcttctacgttgacgatcgagtcatgacgctcaacagactcagctgccatcaagttgtagcccgactggtgagacgcagcctgttgctcgggtcattgtcctggccaatgccatgcgctcaaaatgggacggtctgcgaatacagagcttccatgactgccatactgaaggttcactagttgcatagaatgacatgcagtcgatgtggccataggagtccaatcaccagcttgactttgtggtcatgggaactcgcccagcgccttaatgaccaggtgattgtgcttctggaagatggggtttatttcgcgattgacgacaattagtgcaccggaatgataacacgagtctccggtatgacaccttcgatcggattgcagtggagactcatcatcttctgattgagatcgacaaggatggaacgtctagttctgaaagatggctgaccttatcgtctggctaaggatggtagagttttgactatttctgggaaaggggaaacctgccatcctagaggcgtggtcttccgcctggattggttcaagtactggaagtagcggctcgtgatattaaatggttatggttttgaatggatatacacagctgatacgttgttactggctgacttggccagtgatataagtctccatatcaactgtagccagagtgaacgggagcacctcagaatataatagctttgcaactttgtctggtttaccttgaatatatccgtacagagctttgcagtaatgaaactttatttgaatagaataatgccatataatctttagaagttgaaattcatggatcctggataaagagaccaacttttactataaattaacagtacagggaaagtggatgttgctgctccatatgacacgctggcgtgtatttcgctaggctctcctaccacttgaaatatttcttccatctcaaatatgctatatggtaattatagctacggtatcagacaccgagggcataatagttgttccatggacgtacatcgtagccacacaacaatcaaagcgactagtaacgcgagaacgaaggaatgcaggctctgcacaccgcgggcttgagagatagcatcggcaacgaatggaagtctatgtacggttgagtgagaagccaatagtcacagatcttatccttgtgtaatttgtgtaattattggatgaaaagagacagtttaaattgctgcatcaccgccagccaattccggcacgaggccaataccaggggtatgtagatgctttggcagcaattgtagccactacaatttcccctggaaagaaagggccggacgacctcaagggcaattgaaacggcgtaatgaactgcaatagcgataagttctccttgggtcacagttaagactttcatctgtgaccttccggactgatataacatgcataaccaatcattgacagaactatggacaaaactcccgagcgtatccagcccgaaagctattgggagtcaggccaaactcgtacgaacctcccgacgaacctgaaccataaactcaacggtctacccgcctacagacactgctagaatgttcgtcaggcctttaccggtgattaaaattgggggagagggtcaccctagtccgtggaacgcgttgacaaagcctataaacgtatttgaaatttgccatatcagtatttcacgcacaacagatagcacctataggaccgttgctcgggtccacaatatgcaaatagccagtgtgagtgggtacggagggcgaaaccgacataacgatgaacgggatgatatggcagagggacctattatcgcaatgcctctctgtggaaagtttcatgtgaaccttgctaatcacaaccatgtagccgacaatgggcgtcattaaaatcaaagaagcgaccgtagtagatataatgaagtccccacggagttcttggatgtcagaatgttcaatgatagaggaatagatccagcgcatatatatgagagtagtgcctgcaagatgtgagcttttctatatagacaatcttttaacaccaagactcactcttcagattccattactggcgcccgccatgaccaaatcgataaaggcagctaatggacacgatttgttggtggtaggcttcgctcgaacaaccgtagtatctgttccagggccaaataagctcggtaacatctggcccccctgctattcctaagaaacaagttcaacaatggccattgccgttgacatcttgcgatactcaaaaaggagaagagaacgatcaaaagagcagggcagttgaggggaacgtcactcataatttaggataaacattataaataatcgacacccacctgacaagtctctactttaccgacgagattcgtaagaataatcgtagaaaacaaggctaaggacccggagctccggggcctttaaagcacgctaagtatccttcatgtaccacttcactagctcctcttttccagattctagactggtaggccgacgatgttacatcgcagctccttatggcggcataacttcgtacgaatgtcagcctcctagtatgtccggtctaagacacggcttgacaaccagtagtgttggtccacagttcatcgaatcatcactcgaaaccgcgggatggacgacttgagtacaactgacgtagtgagcataagaagaaggaagttgcaggggtacatgagtcagttgctatgctatacagttgtttcatcctgtttatcagattctgggagatcatagccctgcgacattggggcacattagagaggtttcgccgcttctaacaacagctatctgcgcagtgggtgccttgcatttaccgtctccggatttagagattctgtacaaagagtttgtcgccctaagtgcgccgttgagcttttcaaggaggcacactgtcgatgatgtccgggcgctctgtattggtgctttctggctcagtgacctttccaggtcgttagtcggtctagccgtacgaatagccacggaattgcaattacataagagattttctaaggccctacagggatacaggagccactactcacgcacacgcttatacatgttggtctatgcttgtggccatcacttttccgtgccatatggcagaccaccaatgactagagagtccgaggctgtgagagatgcgcggaagttcttggactgtactcatgctactgaggacgatgcacgactggtaaaccaggtcttacgctggagtatatgcaccaatttttatgacactttcggtgccgacgtcgatcggcctctttcggatgcagatattccccaggtgcgacggttcagcatcgttttggatagccttcgcgctgaatggggcgacaaattcaacagaaacgcttatgtcggcaactatccgcgcaaaggtgttggaatacaataccattttgccaaactttacctctgctctcatgctttgcatggggccggttcaagccatgctaaatatcgagctcctgatgtggctttggagttggaggaaatagcaaacacggcggtgctttccgccctatctatccttcgcgcggtgatctcagatactgagatacagtcataccccaacggcctgccaacatatttcgatattatgattgcctttgcagtggtctttcttctcaaagtacccacccacttctctacttcggttcagcttgataatcaaaaaattcaacgcttgatgctctcattagctatggttttgaagggagtcacagcgaccatgcatccgcatcacttccttgtcagtataacagaaggaattgatgatctcttacaacgaagtaggatggtaactggcgcagctcaagctggaggtatggatcctttgcagtaggagccacagcacgttacatatggtcgcaatacgccgcatgtagacttcgaccttgagactgaggggatgtttgaccagtacatcatgagtgagttcgactttttatcgggacaagacccagagtctttaatatgaatgtctccgagacggccagatttgcagacagcatctaaaactattatctccatttgtgagagtcgacaaccatgatgcaatgaaagtcagacgccatagtgaccacagattattggggttcaaggaatcgagaaagaaggaacagcaatggaagagagagagagagagggtgagagagacaaaccttgcaaaccccgagcgaatgaccgatctgtggtctatgcatggtatggggcaatccaccggtaggaagaatcgactagtatcgggtactcaccggtatcccccataaagtgagaaatgttcggattctttctctctcattcgttgattgtaagcatcttcgaggaaagatgacaaaagctctctgatatcagatgcctgcgcatagacatagagttgaaacggccattgccacaagaagccagtgcaatggaacctatgtacaatgccgacggcgtgaaatagctcactgtggctagcgctggcatatgaattgtctttatattgtttccaagcctagtgctcggatacgggccaagatggcgggatcagaagaggccaaaggccctcaagactacaacacataccgaaacggtaccttagaaagccatagttcaattatatagtcgaatgatcaattagtaaacttttgaaagacggtggatgaaaaaagctaaaggccgtcgtaaagatcctttgtcttagggctgagaagagtcacgtgtttataccgcttatattgcatgagtttcgtgctaattagtttttgccattgtataggcttggctagcgaatggtcttactgaatgattatatgatgtaatagtaaaacgtttgcagatagtgtcatgcctttaaaacaagtacttaacactagaaaacataaggatgccttgatattcggaagagagaaagaccctaagaaaaaggaacatgaaaaatgtgcgagtagaattttcaactttaacgcatgtcgttcccctgtttgaaccaagtccatttggaagatttcgtaatacacatggctgaaagtcggttgtacttcggaatgttaaaactttttctgtgctattgtctgcacgtcgatgttgattgtctcaatgattaaataacctaactctgcactaggcaggtattccgtagtctaacaaagatctagaacatctgatatttgggatcagcatggcttcaacattgggaatgaaatagcacgacgacaatgtttgtggatatgagagcagcaccaggaagaagagaagcaaccagtgggtctacctagcgaattcctagcatttagagtaggaaactagttgacctcgttgtttcgccagcttaatttagcctaaccgcagcggacgcaaaaatttggcactcgcgcgcaccttccaccgggttatacccctggatatggttgggtttattgcaggggcgcaatatggatttgtgttaactagaattcatggtaaggtatgtcatacgacatctttaaaggaaatctagatggtcgcaatgaggatacaggtcggacctttaagatgcatgatgcatctaatgtccgctagtcaagatgagcttgagctccctttgccagggcagagtatgagctgatgtaaccttcttatctgatcggtgtggacattgcagctatactgcgtaagtatataggtacggaggcacaatatgtaccagatatttttgcaggtgtaggaatccctgttatagtagaaaggcctagtccttcgcagtaagcgtacgtacatggatactatcacatctaggaaatgatcttctctcggataaggggcggcgaaaattttttcttgtcttttcttcccaaagataagcaacttactaatatcaattagtaggcgtttaacctatagcagttgataaatggagttatgaagcttcagcctcatctttgagctgtgcttgatctgatatttgagaccttaacatagaaaatgggcatcaaagggagccccatgagacagaagttcgcagcaggtcgaagctttcccgtggcattgctgtaccttgtcgatagtaattaaggtgccgtgctctagtctctagaggataatgaatccaagatgacttccctggtggtgtagacacggaaggaaaccttaggctataaacccctgtcaagtgacttggtcgccttacggagtagtgaacaaaaaaatagtaacggagaaccagaagttggcaggaaccttctgtttccccctccacattcccaggtactaccggaaattccggctcattccccgcttcaatgtctcggaaatctcttcttggactttggttacctgtgcggatcacaatttattcaatgtcgaatatgacataatccatctttggatgcccaaaagacggttgagcgttgttgtgacctgtgccactggggagccaagaaacgccttgatcgcgtccttggagagatccgttggcgtacgcgtgatctccagcaattttatattaatttatcgtatcgggcaaagtaaagctcggacgaggtactttcctctagttggtaagcagtgcgataagttctaactataatgacgggcactactgtatgcaggccaaggccagcctcgacctgcatgtacaacaaatgatcacactgctggatacgatttccggagatttgaaaagcgagatttgcgaggcgaaaaataaaaaaaaaaaaaaaagagaagagaagaaacgagggaagaagaagttttcgatgtgcttctctcattaatggagccgtggactacactggatccttaccaactgggtccctccgcgtatgttggtggagcatcaatatacggggatggagaaaaggatcccaactagacaatggctcgggtgattttgaagacccctgtcaagggaaaaacaagacttttcggtggacgaaaaaaaaaggaaccaagaggcaaaccccgcttaatggtcactgtcgatcattaagctaaaataaattaaacccgacaaggaagcccacagaggcgcaacttctaccaactgctcgtgcgcttgttgactcatggtgctagctaacttcacatgctaccgagctcaatctccgagcaaagaaagccgcatttccgtgaattcttctctcgtcctagaggtttgcctcctcccgcagtcggctgagtttagattcccgacttccttccccatgccaagtgaacagttgtggttgaatagcaatccccattccccacagttgggggatcgttatcttccccaaaatttcctctcaggggcaatgctccgttccccgcaaggtgagcacctgaaaatcatctttcgaagtagttagtacagcaaatagacctggctgaggtggcctccaaccaaggaagtacgtatgagctaactcagataatagtaataattacgggccgtgtgggttgaccacaattcaccgctgctccgagtactcgagtcgtcgtagggtctgtctgggcccgtacctcaatggcatgcactctagtcaggaactaactgctactatggcgccatgcacccaatcaaggaactcccctgtcctcgtagatcaacaagtcaattggagtatgccctcataggcatagccgcaaaaagtaactcgttgaatgtcaaatgctcacttggttcaggaaaaacaagtgcccttgtcgatcgccgaggcagaaccgaaattgagagacaatatctggggatgaaaagagattctcacggaaactcgcaatttatcgcgcttttgatttgctccccgcaaggccgattgtccctcgcacacccggggggatccacggctcactccgaaaagcatagcttgctccagatcgcaacaccttctccgcttgccatcgactatacgaccctgcagcggtactactatgtcgacaagggtgttagcgatcagcatgtcgtatcaactccacaccaaaagggcatttcccccgcagatcgggcccaaaaccttctgccactgacatcagtactggagaagaaccaatgcaacgcagtttgcttcacatgtggggatcatggactagccctcggtctaatccagtagtccccagtagctctatggacagaacggagtagattcccgcacgcctgcagacataaaaggagtcatgcagcctcctaggttctggaattgggctcttcaatcgtcaattgctggccatcccctgtggagagcaaacacccagcatgcgtttctcaacagtagtttccgcccttttgctttccagcacctcgctggcaacaccagcccaagacttttcagcactgggcaatgcctcatcacagggggctcctgaggaacatcccatagctcagacaccggctgctgcagctgctgctcaaccaagcgataatgctagtcaacaacaaaatgtcaatgtccagcagccaactgctcagcctagccagcaacccacggtcaatgttcagcagcagccaactgctgagcccagccagcaacaaagtgccaacgacgagcagcagccgactgcgaacgtcgctccacaatcgaacgccgccccagagccatcttcgagtcccaatgccaatcaacaaacggatggtggcctgctgtcacacctgatccccactggtgttgcggagtcttctgcccaacaggaatctaatgcgcctactccgacagcctcaccagcggagtccgagggcagtgcttcgcctaccgaacagtcgacaacccagggatccgctaccaaaactgccgcttcctcttcaacgtcgtcagctggtagcccgtgggagagccttatccctgatggagttactggaaaccctgggacagacctgggcaatggactccagggtctcttgggtctcctgtctccaacgttcctcaaggatgttgaatcatttttccaccattttgcctacctatttgacgaccagactacggaacagaccaagtctctcattaacattggatccggccttcttactcaagacttgatcaaggaattgaacagtctgctgagcaacgccggcaagctgttgacatctgacttcgttgatgagattcagaaactgatcaaacaacttggtcctcttctgacggatgacctgttcaagcagatttccacattattgaacaatggaaacgaccttctgaccgctgatttcgtcaaggaggtcaatgctctgatcggaaacgccaaccaactactgacagctgaaactgttaaggagctgcggcaacttatcgattcccttggtcctctcttgacccctgaactgtttaaggagatcagcggcctccttaacaatgccaatgatttgttgactgcggactttgtcaaggaggtcaagagtttgatctctgcagtgggtcctctcttgactcctgagctcttcaaggagatcagcggcctccttaacaatgccaatgatttgttgactgcggactttgtcaaggaggtcaagagtttgatctctgcagtgggtcctctcttgactcctgagctcttcaaggagatcagcggcctccttaacaatgccaacgatctgttaacagcagactttgtcaagcagattaagagcttgatcaactcgctcggtcctctacttacacctgaactcttcaaggaaatcagctcgctactggataatgccaacagcctactgaccaaggacttcgtcgacacagtcaagaatctgctcaacgaggccggtcctctacttaagcccgagttgttcaaacagatcagctcgctgctagacaacgccaacaacttgctaaccccatcatttgtcaacgagactacaggtttgattgacaccatctctcctgtgttgacacctgacctgctcttgaaggtcggtagcttgttgaatagtgctggcaagctgcttaccgatggatttgtcgacgaaaccaacactttgattggcaacgccaactctcttttgacagagaagtttgtcaaggagaccagcggtttgattgacggcattgcaccagtcatcactcctgagcttctaggacttgttggtggtctccttgcaaatgccaactctctcttgacaccgaagtttgtcaatgagactcagggcttgattgatggcatttcgcccgtcctcacacctgaattgctcacgcaagtcggcagtcttcttaataacgctggcaagctcctgacgagcgagttcattgatgaaacgaagagcctgatcggcaatgtggcacctgtcattacccccgacctgctggaggatgtcggcttccttctcggcaatgcaacgaacctgcttacacccaagttcgtcaacgagacgagagatctcattgacgatgtcgcgcctgttatcaccccagagctactcggcgaagttggtggccttctcggcaacgccaacgatttgttgaccaagaaattcgtcaacgaaacacagattctgatcgaagacgcttcggaggtaagctaactcttaagctatggtgttgtgactattcgctgactcttcgtttctagttgctccctgtcgtggtgaagatcttgggcacgctgtgaaggatctgagccacagttcaagggcttatgattaacggacaacgaatttacttttaataatgcgaggaaattatcacgtgttcttatgtcgataagattcatgtttgtgatgcttttgggtgccaagatatagcggccccaattacaatgatgtgtgatgtttaataagaatccgtccatagcccaaactagaatccatgagatgattcggttcgcttgcagaagtaccttgacgaaaacaaaacacaaggctccgaagcacgcaattcgtgtagaaaatcgatgtctatcatagctgatagacaatccgatggcttcatttttttcccttcccctatagaaatccacgactcagtccaaaggcagttctttatgccattgctgggtggtcctcttccaagctcttggatcaggtggttaaagttgagaggtgttgaagaagcaaggtcgatgggaagtaggtgtggatggtcggaagccgtaacccacgatagaccattagcaaaacaatgaacggtaaatcataccgagcctgaagcaagcatcgtggcggccgaagtcgtcccaatatgaggagaaatagaacccccaaggtgttgggcatgttctaatagcggtttcttgaaagcaacttcccctggttccctttttcaagctggaatatctgatactttcacttcttggtattttgacaagactttcatctctgtgtttctttccttgattttcttgtccatcgctttctggacatcttcgcgcttcctctcggcgtcctccatcttctgttttacttctcttgcagcctgctcctgtgctctcagagctgcttccggcgatgtatattcttgacgtagttgctcgagctgggcgcggatgtcttcagattccgcatcgatctgagtgcaagtgatcgggtgatatctgtgcggcggcaagggctccccggggacgcggacttcgggaagtagaggatgtattggtgtcgtgcgctgaggcgagctcaatgggaccgggttggtagttggggaaggcgtgggctctgagggtggtgatagaggttcctgattcatttttgcgctttcaattggactgaagatgggcgtgctatctgctgatacttgttgaggctgttcaaagtactcaagatgcgctcgtccgtggattttacctccgcagcgccgggaagacgttcaaggcggtcagtttctgcagaacgtatttcaataacgcccgccttggcgcggagtgtggggaaaccagaagcatcgaactgtcatctgtgaccgagaggagcctatacgatattggcataattgaggaatagatgctaatatagtgctcgctggactgagccttgccaaccatgcaggcttttggtatgtccaccccctatgtgatgatgccctgccagcggagcattatccgtacccctatcagccgggacatcatgacctcataggaccctgaggctaacgtatggatctcttagttccaaagaatcggagggtgagtcaagcgacatagtctgtttattcaaatcattgactgtgttctcagcccaggtttgagcttggtttaagggtaagctattcgagtcccccggttttcataattcacatcgatactgataccacggccgctgaagatagtcgatctgaacaatgttcctctcgtgaatggcacagcgtttgtcaaatggcgcttaccttcgtcaagcggcgccgaaaaccacgggcacacggataaggcggtgatcattgaccaccgggcatactggaactacgagaagaccttgcaggttcgacttactatcgaccggaaccagagcttgcacgattgtgaactacaatttgaaattatacaggagtttgaatcggggggaggcggcgataccaagaactttttgggaaggatcagactcaacctcgctgaatatgtggacaagagcgacgatgatgagggtattgtgaggagatacttgatgcaagacagcaaagtaaacagcactcttaaagttgggatagcaatgcgtcaagtggagggtgataggaatttcacgacgtgtgttcatacccgccgccacacatcctggtttggtgactgacgtgcggtagaccccctttgaaatcggccatggccttcggtggcatcacaggcgtcatttcttcagaacaaaccgatcctgacgatttgggtccactgccatctattcacatgcaaagcagggaagctgctgacatgcaggatatgtaccgccggactttggctgcttcttggaactctcgctcggacgacgtacctgcggataagctagttgaggaccttttctcaggaagtattagctggagcaacgaagttcatggtcttcaatcggccgaggctaagggaggtgaacatctcccatctatcggtgcagctacgaaaaatacatcggcgaatagactttcgcccaattttgaaagacgaccaaaaagctcctcaagcaaccagttccgcattgacggtaaattgcccgaatttaattcgagagttggtcacagtaggaagagaagcagcattgaacatcaactttacggtactgcgaagggcaatgcttggaagaaccgtagcaatgaccacgaactctcggagtttgatgttcgggaggacctaaggagctgggagattggtgttaaggagtgacggcggaaatatttctcgagtattgtgtttaatcatgtattttgtaaataatacccatatcttgttttttttttttttttttatctactatctttacactatcggatcgtgaacattgagatcggaaatctatcaccgattaggaggtgccccatatacagtgccaggtgggctattcctctttcagactagtgtaattctagcatcaattctccaagcttgaaagttgagcttcaacattccgtcggcgaaaatttactcaccaagtgttattctctttttgtgtcccagatgctttcgcgatcttccaaaggtgtcgcggggcttctgagctgcccgatacccccttcaagcagaaaatgttcgtcgccatcgactcttcgactacgcgacgtttttgtccggtcccagcatacggacggcgaatcagaaaatgatagcacagagagcgcagatagcgcagaaaacatagaaagcacagaaaacacagagagcacggaatctcgaccgcgccgatacagacgcagattcaaacctcagacgacgccaaagaaagaatttgacaaggtaccgattaatgtatcttccttgggaaatcctggtgaagtagttgtcgtaccgcctccgaagcgtcgccgctttgcctggctcaaaaatccgcaatatcgcatcgaccaagacacgaaaactgcactgccgtttatgctgaacgatatagagaacgacgacctcctcgatagcgatctaattacagaacgaatcgaaagtttccgcgcacattatcggccgggagataaattgagtcccaccgattgggagaatcttcgatcaggtttccagacatcgtttacaaaccagcaactgtcggactacattgagcagtttaaggcggaagacacagtgccagaagagggcttaatgcttcatggaggagcaaaacttgcggaatggaggccggggacttcggcattttttgaaacggagtcggccccccaggcgggcgccgctaaaagagttgcaaaatcgctagatctgagaggcaagtatgtgctcactgagcggatacttcgcgactgctggcaccttgggctcattggcgaggtcggccagctggatgttcgtcttcccgcccattcactatcgttatttctacactccgagcacttttccttcgaggagctggctggtcttcacgatgcgaagattgatatcacccattcgcttggtcttgttcgcatcaccgggaagcagcattcttgtgaattcatccgtgacatcatatacgacgccacgaccaggatacgagaggaggatcttgaactgtaccctcctggcgctactccgaaaggcaagaatcgtgttttcaccgccgatttcttgtcatggattagcaagacttacggtgtctcattcgacctgaccaccactacaccaactaagctgttttaccttgccgaaaacaaaccgaaagcggacagtgctcgaaggacattgaatttggcaattcacgatgccactcagcctccgataccattcggcacttatatgccagcctcggaacctgtcgacacctacgacatcaatcccgaactcaatgtatcatggttcgatcgacagaagtcatggttccgctgggccgtaccgtcggcgcaaacagccccgtcgagcatgtcagacgcaccattcttcagtaaacacgaaatgcgcctatcagacgaactccttaaacttctgcgagcaagagctcgcactaaactcggaaacgcagaagcccacgagagcataacagcagccgtcggccggtgtctctttgagcacaaaccgttcgaagggaaagccatcaccgccgcccaactaggcaaaatggcacctccacgaactttcacaactgacatcccccgagtaattccatttctgcaccagctcaccgcagattacccagaggacgaagaaatccagccgcaccgtctccgcctagtcccatccgcaatccacgcccacatcttcccccaacttgagctcgaagtcgccatagccccaggaggttttgaatacaacgtacaaaacgccaaagcgatcctctcccaaagcagcgtcgactacctcctccccgaaagcggcctcgatcttcgcttcacccggaaattaacccacgacgtactggacagcttcggcgaggacgcccccctgcaacccctccaggactccctgcaggatttcttctccaaagccgtgatctacgagggcgaaactcctctcccggccttttcgcagctctccatccccaaccatctcttggttgagacgggcgaagaacgcgatcccgatggcttcactacggcggagtacatgtatctgcccgtcaacgattttcggggcacccgtctccatcagtataactatgagggtcataggcttaattactctttctatgaaagtggaccttttagtcctcatcgtacgacggatatcttcttggatatggatgtggatggctcggaggaacagtctccttcggagaatggggactcacaggagcctgttcagcaagagtttggttctttctataaggcggcttgctctttggcgtttgagttggatagatccggacgtgtgatgtgagatggatgaggtgaatgctaaatatatatgtacattacttagattttctttttcagatgggccctcgttgcccttgttttaataatttttgaagaatgtaaatacatttatacctcaagtgttgggttaaatatcatgtagcatagtgtgacatctggttattgtggtctcgcaggaatttgtgtacattcccgtaggactgtccaatcccagataaatgagagcatgctcacattaatcggacatattatggtccaagtcgtgaggattagggtataaagtgcggctacccatgaattatttttcctggtaagtccgcctgagaaacattaaaagtatgcagttggtcaggacatcagtggcggcacagaacaatccatcaccctaatatcacattactgtatctcaatgaacactgtaagtgttgatactaaccaagtcgtaaaagtcgctgacgcccttcctgaagccattctcccattcctcagcaaagtcctcattcaactttccggtatcagcaaatcgttttcgaatccatagctccattgccccgatcttttctcctccattccaaccaccggttataacgtcttgtgacaatgcaccaaaaaagttcaatgcatccttgaatccgaaatcccaaccaagggcatactgttggtactcacaggtatctgatgagtcggagtgttgtgataaagcagtctcacgggaccgcaatcgttgggattcggcctgtgcaattttaatgataacttgtgctcggggaattgcaagccatgaaggagacggtatagcatcagcactgacttgtcgctcaaagtcccactcatcaccagttatccggtgtattttgaagcccacgaaagcggacccacatgccttggactcccactgtttgctctgttcttgaccaaaggctttggttaatgtcggcctctcggacgcatccacacggtcccaggtttgtgcatccaatgcgcagctgtattgtccaatataggcatctaccgcagttctctgagagcccactttgccttgacgagttgaaagttcggatagctcattatggatccgtgagatgatatccctggggtccatgtgctgatatgatcccgtcgtgtagtacttgtgggtatccacgataatcgggctcctagctaccgggctctccagtcggttcttcatcatagcatagtccaacgcatcggcgaaattcccaccatcactgatgtagatgggcaggggtgggttaatacagcttgtgatttcaagaacttcatcataccatttccgaagatcgcaggttttccagtctgtttcactagatatttgaactccgatcaccccaaacatcgcatgatacgtaacttcttggacgataaaagcgacgcagtccgtggccatggtccaattgcgctcactcgcgcagaagtcagcaatcccgatctcactgtgactgttccggtccatactacctggaatggtctgaaaatcaatgaggaccccgataccatggtgatagcatttctcgatgagacgtttcaggatattccagcaattgacgtacacctcagatggctcgccttcgaaatccgtacccgtgcagaacactggcccaagggtaaaaaagcctatcgggatacgtattgagttgcatcgcgccacatctttaagccatatgatatcgaagtcggtcagagcagtccgccagtgtgcttcccattttgagcgggtttctttgagtccgcaagccttgagcgatctgtgtgcgtgaaagtgtatcagtaacgaagccagcagagtaggggatctccctatgcgcactgaccttttcacctcttcgagctctctagaacctccggagtcactactggatgcgccatcacttagccagggtccatggacgaacatagagcctaggttggtcccatgctgatatcggtagcgaaatatatcctccacggttggtggtgtatagtttgggtcagtcatggtcacgcagcggcttcgcagatgcttagctactaggacaagccgttgctgggtatttcagtttcaggaatttgagaatgttgacgcggaaccaaatagtaactaaatctaaatgcatgggaagcaacactgatactgtgttgggaaaattctaagatggaacacgggtgatcaatggccgccaaggacgtttggaactagctggtataactattggaagaggtagtccatcacaggcaacacgtagcttctggactcagtatcgcaagattggttgatgttccaagctgggagtacagaatgggacggatttggaaagggtggatgtaccagtgatgtcatctctgaattatgaacacttttagcttactaacagcacaatgcgcataattaaggttcttgattcaatttatggatcttacgtccttgaaattgaatattgtagacatacggagtacaatgaaagtgatcaactgagagccccaactactgtgcaacaacacgcttgacagtatcccgaaccgattccaacttcaaccccagcacatcgttggccaaggtcagatccttggcataattagcctgcaggcctggggtattaccaaaacaagtggcgcggaccagatggaatgcaccactgaagtcgccagcaccgagtttcttaaatccttcaccaacctgctcctcagtggcggttgctttcatggaccatttagcagccgttacttcttccaatgcagccacaatctcgttctgggtggtttcgacagaggcaatgtagaggtacttgttactggtctcctggggttgttgtagcactgaaaccactgcttcgccaagctgcttctcattggtaagggtgaagctctggttaccgccgtcccagatggttgcagtacggtttgcgacgtcaaatccaaggaagccatttccaagaccctgttaaaccgaatgagtcatatcactcagtagggaaagtagagaaaacgagtcacttacccaatcgagcaatcctgaagtggcgatggcagtccacgaaaggccatcgggttgcttcgttttcaagtactcgatgagctccttcttctggccaaagaagggtgccagtttcaggacagcctcgttctggctgttggaggagaactcagagggaataaatcgttgaacaccagaccgaattgcagcatcgacaatcttcttctgttcgccaaatgccgtggcacctacggccgagatgacggcgtcttggccattgaagacagcctcaaggtcggcatctgagaaatcgctcttgcaaacagtgataccggccgggaagctagcgttactttccttgcgagacaagacggtaatgtgaaagctggaagatgcaacaaggccatcaaggatgatcttgccgatatcgccgctagcctaattagaggtgtgagtttggtggtgaaatgcgaaagaagggattgtacatacaccaataagaacaatgttcttgtatccgttcatcacagaatatgaatgaagaactaagctttagagcaagtagataacttcagattgagaggtatcaccggcagtttgcggcgatgtctctgctttgtgtagtggaacagctgaagacgtgacgaggaggcatctttatatgcacgaggatgaacactccggtgaggtatttacttttctatagaggatggtcagtataggatcagtaacaatgtcagttcttgcgatgacaaatggatgtgacgcttacatgcggacttgtcctccgttcctccgccgtagccaatcggagcagctcccttctagacctccgccatcgtggattcatagtcaggtccgcttgctccgttagtagtactgtagtacttcccttactcaacccactcagcttcaacaagcagcagcaatccatgccccgccgggtgattacgtcgggacggtcttgtcttgagtgccgccggcgcaagatcaagtgcgaccgatccttgccctgtgcatactgcgtccggacgcatattcactgcacatacccccagcccaaaacaggacaagatgccgatcattccgtggacagtaaccttgtgggcagggtggaaagcattgaatgcaagtttcagtccctagaaagaagtctagcccagatcaaacaactcttgcatacgaatcctccactgtccggtcaggaacaaaatcagttgagacctgtaagcttgtctttcactattcaaagtgaacagtagaaagaccataatgagtaagccagttactaagacagtagtaggaaattgaacaggataggtgtagctccggctgctctggtgtttcccatgctgcttcacgcaatgatggacaactctggcagtctttccctttgaggccggacccttcgccagcgttggaaaaccttcatccttctccacctgtaatcgcgttcatctggcagacctacctggatgtggtagatcccgtgctaaaaattttccatgtcccgaccgtgcaaaggcaggttatgagtgtcattcgaggccgatctaacctcgaggctcccacagaatgcttgatctttgcaatttattactcaaccgtagtgaccatgtcggcggttgaatgtcgtggggagtttgatgaggataaagctgaactagtgacgcggtatgtatgtttctcatgggaaaacgccttcgctgactgggtaaggtatcgaacgggcgtcgagcaggctctttcgcgcgcgaacttcctcaggtctctggatttgacagtcctgcaggcatttactctttatctggtagttatacacctatgtttggaacaaaacgggacctaataattttctttctagatctgcggcagaaaggacgagaatgggcccgacgtatgcacgcttataggcgttgccattggaactgccatgaagattggtctccattgtgacggagctgatctaggtctgtctcctttcgagatagaaatgcgtcgccgtctctggtggcagatctgcattttggacgtccgaacggcggaggatcatggctctgaaccaaccatactcgaagcagccttcaatgccgaattgcctttgaatatcaacgacactagcctgcaaccggacatgagcgagctgcctcaagttcaacctggaaagaccgagatgacctttacgctggtccggtttgaagtgagccattttgtgcgaagagtgacattctcagacaggttttgccgcactaactcatacccaatcttgagtgaggcaaagaagtgtgaagcaatagagcaattcaaggagcgtgtagagaaacaatacttatcatattgcgacaaagaagttccacttgactttatcaccgctacttccactcgtctgattttggtaaaattgaaattggcagtatgcaagctacggaaggatcaggctccgggcatgcttatgcagacgatttaccggaggacttgtgaagaagtcctgcagcacgctcaaacactgcgaaattatgagaagggcaaaagatggctctggctgtttcagacctatgtcgaatgggattcactggcttatctccttctccatatctgtacagcacctccggaggagctgtctgatgcgacgtggaaaattgtcgacgagatctaccaccactggaaatgtgaatcaggtatctatcgggatcgccgctggagacttattgaagagcttcggttccaagctttgagcgcacgagctacgaagcagaaaatccctcaattgccacgggcgacgcaaccgggtcatcacacaacacctgaacaatatgatcttggacctgcggccagactacacaaagacccgtccgccagagcccatcgaacaacagataccgggatcgatcagccatctaacgcggaagctgctgcttacgtacatccatcgcaggtggcagggtttcagacaacagagtccaatcctactgttgatcaacccttccccatggggacactcatcagcgcggcgactgcgacatctgtaactcaacccgtagatgaggcaatgtcgagtgctgctgagttgccgagtgggggtactggctgcgagtggagcgcagcgctattcgaggtgttttgggatctcactggatctggacaaggtgcctctgtatcgtggctgtaactatctcgttttaggtcacttgacagtgcgtacatgttttgaagtgatgcgaagcaagggcatttcgaatgtccatcccttggaggtataagttttgagctgctctttcgtaatctttagttatgatacaccgaaaggaggagattcgtcgcaaacaaatacaaaatatttgtccatctcggcaattccccgataacaaaacaaagaaaaataaaaagaagaaagcaatacggtgtgtcagtagaccgtgtaaaggatggatctatagagagtggtctaaatttaacacaagggatgacgggggctaatttatattgattaaggttaggccttgacgtaaaaggtcactaggcgaggggctccgcattttcgagtcccaaatccgtcccgttggcccaaattgaattgtcactttcccaagggtccacgcaagttcgtgccaaaaccctacctttccttggtttccaccttcttttctgacttcatttaactctctccgggccaaaagcgacttctcaactacaggacccccctcctgtatagcaccagtgccaatttgttcccctcgacgcccagtcatgaagcttatgcggatatagcaaacaacaaagacatggagagaacacgggtcgctaaggtttgccgactgccgattatgcttcaagtttcaagatctcctgacattctcctcatccgtgattgcaggttgaagatgtgaccttggcgcgtcgtggtgaacaggttgttggcaccctccacctcacccctcatcatatcatcttctcccatataccgtcgctgccggacagtgcgcaaccttctgctacgcccgctagaccgagagagctctggatcacttatcctatcatctctttctgtaccttccgccccgctccggctgcttcgcgtcaaccgtcgtcaattcgtctgcgttgtcgtgactttgcattcgtttgcttctatttcgccagcgagacgaaaggccgtgatgtttatgagagtataaagcagtggacatgcaagctggggcggatcgagaaactttacgctttcacttaccagccaccacctcccgagcgggagctcaacggttgggagctatacgacccactgaaagagtgggcaagacagggggtagaccgggataaccatggctggcgtatctctcggatcaatacggattatacggtaataacctactctggtagtgggttcgagaatgtggttaacatggacggatttccttagttctccccgacgtatcctgcgctcttaccggttccgtcctccatctctgataatacgcttaactatgcggggcgataccggtctagggcaagagttcccgtgttaacgtatcttcatcccgttaataactgctcgatcacaagaagctcacaacccctggtgggtgtgcgtggaaatcgaagcattcaagacgaaaagttattagctgcgattttctccacctctcgttccaagagaccgctggcaaatttctgcccagcgcacttagatcgagaatcttctggttcaatgcaaggcgatgcgaatgatgagaccgtgactgatttgactagggcggaagacttggaggatgagctgttaacgtcattccacggggactcggatggcaagcaccaggtatacggtgctcaacagcacaacttgatcgttgatgcacggccgacggtgaatgcatttgcgatgcaggctgttggtctcggctcggaaaacatggacaattataagtttgcgaccaaagcatatctcggaattgacaacatccacgttatgagggactctttgaataaggtgattgatactttgaaggactcagatgtcaccccgctaggaccaaatagagaccagcttgcgcgcagtgggtggttaaagcatattactgggattttagacggcgcgggcttgattgcccgccaagttggccttcaacactcgcacgtattgatacattgctcggatgggtgggatcggaccggtcagcttagtgctttaagtcagatatgtcttgacccctattatcgtacgatggagggcttcatggtgctggtggagaaggattggctttcctttgggcacatgtttcggcaccgctctggacacttgaacagtgaaaagtggttccagatagaaaatgaaaggatcgggggtgattccagtcgtggcttcggggaggccggcggtgcgggcaaagccatcgagaatgcattccttagtgccaaaggattcttcaaccgagataacacaagtcgtgactctcttcccgagtccgatggagaaatgcaaagctacgattcagacactcctggtcccaagaaactcagttccgctcctagatcggttacccccgaaaaggagatgacgaaagtgaaagagactagtccagtgtttcatcaattcctcgatgcaacctatcaactgctgtaccaatacccgacacggttcgaatttaacgagcggtttttacgccggttgctgtatcatctttactcgtgccagtacggcacatttctctataacagtgaaaaagagcgtgtggagtcgaaagcaaaggagcgcactcggagtgtatgggattatttcctcgcccggagagaacaatttcttaacgcgaaatacgattcccatattgatgaccataagcgtgggaaagaacgtctcatattcccacggctcaatgaagtcagatggtggagtgaagcatttggtcgaacggatgctgaaatggacggtattcgttcgactgggtctcctcctgcgcaacgtgagaacattgatagggaacgatcaccggtgctgactggcattgagacagctcaggatgttgtcaccagtagcactggtatgaaaggggctcacaatgctgcctcagctggaatagcagccgtcacatcggggatctcgagtttggctttctccaagaaggagaatgggcaagaccccaaaagtatgggtcaacttgaagtcgagatgcgataaacgagtaaagaaaaaaaatgtttggtattagggcatgtttacgaatcggtatatctacgggaactggcagggtatcggtccgggtgcgatgggcataaatcttcgcttatgaatatgtgcatgactctgtgcttggcttgtcaattgtttgttcttcagattttcagttgttctcagtctgagtagagagatacagcaaggggaacgataaacccatcatttcatggcttgcactggacttattggctatgtgagcatagcaagatggaaagtgtttgactacatagaaatattaacactgcactgcatggagagctcattacctaaagtggttaaggttcgattgtagggccccatagtagaagtgcctgaggccagcggacgggctgggcaggctaggtccaaaaagggaaggggcacaagcgacgggccagggttaaccctatcacagaattgggaaggggaaaccctaaacgggcagaaaccccactaaaggccgactgttcaaaactgatcgaacggcagccgattatttcgcctttgaacgacttcccaactttggtgctccgcaaccaccgcgtcctcggccgtttcttcgacaactcacttcacccaacagaaacgcaatcatggctgctgtccagggagctatttcgaagcgccgcaagttcgtcgccgacggtgtcttctatgccgagttgaacgagttcttccagcgcgagctggctgaggagggctactccggcgttgaagtccgtgtcactcccaccgtcaccgatatcagtacgtcgcccgattgagattccattgctttttctttgcacttgttttgtgggaggtcgagaaggattgagcgataaacaatggaagggaaaacaaattttcaaaaggaaaaaaaaaaagaaaaatatatgagacggaatgaattggatgtctactggtgcaaaattgtcggaaaaggatcatacacgattgctaacggatgctctttttctctgcagtcatccgtgccacccacacccaggaggttctcggtgagcagggccgccgcatccgcgagctcacctccctcatccagaagcgcttcaagttccccgagaactccgtctccctctatgccgccaaggtccagaaccgcggtctctccgccgtcgctcagtgcgagtccctccgttacaagctcctcaacggtcttgccgtccgtcgtgcttgctacggtgttctccgtttcatcatggagagcggtgccaagggttgcgaggttgtcgtttccggaaagctccgtgctgcccgtgccaagtccatgaagttcactgtacgttctctcgcatatctcaatgaatcgtgattttgtcggcgaagaaaggcggtgtgaagagagaaataaaccgttgcggttttacgaagggagggaaatcaacagcattgctgacatatatctggctataggacggattcatgatccactccggtcagcccgctaaggagttcatcgacagcgccacccgtcacgtcctcctccgccagggtgtccttggtatcaaggttaagatcatgcgcggttccgaccccgagggcaaggctggcccccagaagaccctccccgactccgtcaccatcatcgagcccaaggaggagcagcccgtcctccagcccatgagccaggactacggtgccaaggctatcgccgctcagcaggctgccgagcagcagcgccttgccgagcagcaggccgccgagggccaggagggtgctggtgcggagactttccagcaggagtaattggtttcattttcttaggccctgctcttttttcttcgttcctgtcgtcctacctgatatcattacctgacgcaaataaacaactacatgatcttccatttggttatcttcctccgctagcaagctaggaaaagcgtcttcccgtcccacagctctgttcctgaattcctagtgaaacatctaggtaggaaaagataatgtccgatacgaaactagggggcaaataaaaaaagcaatttacggttcaatatgtgcaacgattactaagtcacgggaacaataaaaccatggccaacatgtagatatgaaagtacaagcgaatgtgacccttgttctatagtcttgtagaatgacgacattgaaatgctagcctgacacatcgatcccgttaggatatagatagtaccattcgtatcaatatcacttttattttgttatcttttaatgctcattcatgacatcaactacctttctaaacatatatgaaccatgaaacatctaagatctacgcacgttcgctcgctctactcataccgctcataggaaagcctcgatgttgagctccaacgtgctgacggggtatttcagttcgtacttctccaataccgtagggtgcaagataccgaaggcaccgatgacgtgctccttgccgccgattcgcaggtgaacagaagcggcgtggccggggaagtaggttgcctctggaatgtatgttagggaacaaatctatggcaacagggtgatagcggtaactagaacttaccatcaagctcctcgatccagtactgagagtcgctcataccgggtttctcgagaccctcctcaccggtgatgaacgcactcttgagcatggccatgacgcggtccagaagaccgtggactacttcgaaaccactgttcttgccataccatgcggcggcaaagtgtctctcgttccggctcttacgctcgagcgaaaggtccttgaacgctacgtcgctgacctcgaagatcttcatgggaacgctgtggtgcttgttttcccgaatggtcttcagaagaccaggcaggaggcttgtgcggacgacctggaactccagtgtcttgggattggccagcttaacagcagtgttaccatcgtccttgcggttgagccaggcgaagttctcgtcatgggagcacaggatgagaggcaagacctcagaccagcccgccattgcagcctcagttcggacgatgtccgagagcttgttgataggtaagggctgggcgatggtaccagacttgcttgggaaggaccgtgggaggttattgaagccgtaagcaatggcgacatcttccatgatatcggcctggtggaggacatcagcacgagtaggtgggatgtccacgtcgatcaggtcggcggattctgcggagggtctagcggtataggccatcttcgtcaggatcttcgcgatttcctctgcagagaggttcaagccgcagcactggttaaggtaggagacctcggcctgagttgtacgagaagacatatctggcgtgattctggtctcgccgttgtggtcggagacaatttgaactggctcaatcctatgagaggagattagctaccggaacttggaactgggaggcaataggaggtcttacgtgaaaggctccgaagtatattgggagaacatcgcaaccatcatcttgttgacaatctcaaccttcgtcttgtcgagggcagtaatctcgatgaaaacgttcttagtgtccagggtgatcttagaatggtcgccgttgatgatgggaggcagggagcaaactgtccgcttcgaatcgtagatgacggggtagacaggggagtcgcgaataatgtgaaggtatctacccaggtgcttgtctttctgtttacagatgtaagcatatatcctaacctgccgcatatgcagttaccatacctcgtagaaggccatcaactcctctccgttcatttcctgggtctggttcaaaggaacaaatttgatgtctttaggaggcaaggcctcgtaggtgaaaggtccttgtatcgtatccaagtcgtgagtaccgatcgaaacgagcgttctttgccttgcaaggttctggtgaagtttgtcttgcagggcgatgaaggattcatagcgagcttgatcgaacttgatgttccgcaagatagcaccagagaccaagggtcggattttcgtagtctttgtcatatatcttcagcgtgggttcgtcacgttggcaacttctaagagccacttacatcctccttaacaatgatcttctgcagctcaccatttgcgggctcgaccagtctgtagttgggcagagacttccgacctaagaagatgttgagcatgagggcaattccctcgaagcacagcatgtcatatctgcagatgtctcagaatgtatatcacatatcaatcacccgggaatcagtagatgcgtaccggttggccgggatttcgatcttgagctgaggaggctcctgcactccatccacgattggtcggtctgaatttgttgtctataggtttccgtttagtgtccatccacattgcgacgggtggtaggtagagggaggagtcgttacatcttcatcgagctcaatacctgtttaaacaagtcagcgtgagccccgctaaaaaactactctctctcaataaccccgacataccgaattcgaagcacagctcatcaaattcctcggtagtgtacctaatatcataagaagtactattagcaattgatataacaatttggctaggtcttccatactcccgtccgagctctttgaagagcgcggccttgtcgaccgaaatggtgggcatggtgaggggttgggtatttgcgattcaagataaagagattggggctcgaaagggttcagtaagcctcccacgcacagaaggtaactctatggaattacccaaagtccaaccggcaaaagtgtccgtgtgcggggttcagtgattgcgctgagtctaagtatgccaccggtggaggagtcataaagtccgtggcacttttacttggggcttgaccctcaaggcgggcgctgcgccagccacatctccgtgcaccgccactgattacacccctccctaaattcattacggaacggcagattaactgcgcaagacgccttgcaccagccacaagccccattgctttcccaaagtcacggtgaccagcagaccgtcaccttcgctagattcctccagaccaaagcttcccctccactcgcgatctccgtcaaatctattcccaccttgttattattttccattatcttgttttctgaacattttaatatcttatgatacactaacgccagacgattgttcgctcggtaccggtccaattgtcgaggtatgatactgctgctattattgctcacttgtcctgcggcggcccaaaccccacgaaacctctcgctccggggatcttgcaaaccacctatccctccctataccaccgatactcttcccgacagctgaaactaatccgcattcgagcagcctccgcaaattgtcgttactttatatgacaacccaccctttttagaaaacccccccgtaattatcgccgcgttcgcgtgatatcagatcgaccagtggtctaagtgaggacttggacctgtcacgtcctcgcctctctaatcgtctcctttgcctgaaagcataacatacaataaacgaattcgagatggagagtcagggtgaaaacgacgagctctaccctatcgccgttcttattgacgagttgaaggtatagcactccgtcctaatggcgcggtacccctacacataaatatcgacagatctaatccccggattttctagcacgatgatgtcctcattcgtctcaatgctattcaccgcgtttctaccattgcattggctctaggggctgagaggacccgggaggaactcattccatttcttgacggtcagtctccggccatcactcgtggaccagctaggaaagcagagcacacctaacacaagccatcgcagactctgtcgaggacgaagatgaagttttgactgcgctgagtgaagaactgggcaacttcgtagaatatgttggtggtccggaatatgggcatgttctcctttccccccttgagaacctggccgctatcgaggaacctttggttagggagaaggtaagatacaacaacgaatgaatccgttgatcctgtgcttacagagcactaggctgttgaatccctcaacaagatcggcgagcagctttccgagaagcagatcgaagaacatttcatccctatggtcctacgtctgtcaaaagccgactggttcacctcgaaagtctctgcaacgggtctttattgcattccatacaagaagtctggccaagcgttgcagcagagtctccggcaatatttcggaggtctggtacatgacgacacgcctatggtgagaagacaggctgccaacaacttggcgaagtttgtcaaggaaatgaagaccccagttgtcatcgaagaaatgatacccctatttcaatatctggccagtgatgaccaggacagcgttcgcttgcttacagttgatattcttatctcgatcgccgaggagatccccaaggagcagcagcctagccacggtgttttgctgacatccctacggaacctctttgaggataagagttggagagtcagatacatggttgccgacagatatgaaaaggtactcccttctagcattgcatgatcagtttacatctatttgttctaatccttcttcctagatcgctaaagctgttcacgaagaagttatcactcgggatatggtaccctcgtttgttaagctcttgaaggatacagaggctgaagtccgtactgcgattgctggccagattccaggtatttattcctcggcttacttgatacggttcctggcctaacctgaagataggcttctgcagcttgatcgaccgggagacactgcttaatgaaataatgaccagcgtggaagaccttgtttcggacccatctcagcacgtgcgtgcggctttgggtactcagattagcggacttgccccgatccttggaaaggaagagttagtaaaaccaacttttttgaaaatgatgaactagtgaagcttacaactattgccaggaccatcgctcaccttctccctatgttcctccaaatgctcaaggatgagttccctgatgtccgtttgcacatcatttcgaagttggagttggtcaacaatggtaagcttggaatctgatgacatagtttcatcatctaacatttcgcagttattggcattgagctgctctctcagtcgcttcttcccgctattgtacaactagcggaagacaagcaatggcgtgtccgtcttgctatcatcgaatatatccctcttctcgccagccaactgggggttaagttcttcgacgagcaactcagcgatctttgtatgagctggcttggtgacaccgtcttctctatcagagaggctgccacgcagaacttgagaaagctcacggaggtatttggggttgactgggctaagggttctataatcccgaaggttatggccatgggacagcacccgaactacctttacagaatgacaacttgcttcgcgatctccgtgcgtatattgtatatcccacggaaatgtaaacccagctaacatcctctccagacactcgcacctgtcgtctctttagatatcattgagaactcaattcttcccatcctggacagattggtcactgacgagatcccaaatattcggttcaacgttgccaagtcttatgctgtgttgattgacacattgcgacgcttgccagcggaggggactttggctaacgtggaaggaaagactgcaacgccatcgccgcgtagtcaggaccttattcagcagagaattattcccagcttggagaagcttcaaggggacgacgatgtggatgtcaggtacttcgcaacaactgctgcgggcggtaatgacgaggtcatgcagacttcaccgtaggcggttgacttagctagatagatgctcccacgctgtatgaaggcccttcagtgcgagtgggaaatgatacaacggcactcacactacttctgggaggactgtcaattttgttaccttagaaatggtcagagcatctgactgggatgaaatgcttaaaggcgttttacatgtagagtcttcttgttccattgttcaataatcgtgcataaatctaataatgcaaggcctgaccctcttgacctctccagctaaacgtatcgcggtcattgagtattatgcatgcctatcggtatttgatgaatcatgtgatccaggggctagccactggtaagcaatgcataactaagacacccaaaaatagtcgccataccagttatcaagttctactaccacccttccactttctttccttcttgtgaaggatttgttgccatttcggttcttctttccaatctataaacgacatcccgatgtcattacagtggccttggcactttgtttctgtctctcccacggagaaacagcatcgccgtgaacttctaggtctgcgcggatattatgcacaatgctcgttcttactttttataatacttgtacgggtatataacagctacttccgagccagagataaaccgaatgactcccgaaccggccgcaggcggaggtcatggtgggatctgcccccttttgcaaattggacagagacacgtaagcagtatactatctgtattacctggttggcgtgcctgttgggcctctcgatatggaattctggcaatggtaggctgcttccttttttcatttaaccgttgtatatcatctgaactgctttcgccccgtatttattcacacccatcagttctgaggcaattgaaaaagttatataaagttaaccatcgcacgaacagactacctacatctcaccaaagccctgggtcacgtagctctttcccagctaccatttcaagttctcatggccccggcattttatctcaactccaaaaacccagccacaccatccatgatgtccagcttaacatctatctcgcaaccagcactgactccataccaccgcctgtttggcaggatagtcatgtccccattactagccgtacatgcggcactgtatctaaatttcttcgctcagtccagtcatccagatttcggatctttgctcgcaaagcgcatccaagacccggatgtccagtggggattcggcggcctgaccttcgcattcatgatcctgttttttgtccggccattgcgtactgcattctgggtgcaattgtggccgacttcttctgttaaggctaggagggagatgttttattatgggcatgtttcgttagtggtgttgttgtgtattgcggcgtatttccatgtggctcaggcgcagatcttcgtgattgaggccttgggtgcctcagctctcaatggggtgtgtgggttgctgctggggtagatgcttaacctgatggtgtacctatagtatatagtaagcctagttgtttgtgtaagatacgaaaatgaatagacatcttgtttcatgggaaatgtatgggctgtaggtcgagcgagggtgctgcgggagaggattgaccatccggctattgagataccccaaggaccgacagatttattataggacttgggtgaatctgcgtggtctgggggagacaatcgtcattgtcttgtttgttcgagaaggtattttgtcagactatagaaatagtaatattcagaaaaccctagtcttattgaaattcataaaatatgttatgtttaagcataaatgatagtccaccgaacttggacctggtagagagacgcacagcttttctatataggctgtattaaatcatcaggctggctgatatagttttctacatacacgtacaactcatgatatggccgaagggtatttaccttgtatacttcaagttaaaagggaaccgggaaagcacgtgtctccactgtaacatacacccacggctgcaatacaacgctgaatggtctcgctcagctgagggctttgatgtggcggaagtatagttccaggataccggtcatatgagaaagtatgcctgctcacaggaacatatatatattcctactagagtgcgttttagatccaatgttatttcttgacttacaagcaagggcatacctggtacagcgatttgatcccttgtaaatttaagatttacaaactcctggtctgctagatataggtcagtcaaaacttgtctcttctttataatgccgtgatgaagaacatcggaatgctacagtggagagtggagccggagaaaaggagggagaaaatggtcttcccgttcatgggatccgagccctagagggaaaggggcaactatgtaactaaatagagaacaagggtttataaccttaacgtgtgcctgggctatatctcaagagagcacggggcaattgcgtccatccatcatggatcatggatcaatggattatcaaccgccttactggaaaggggttagtcgtaagcagccataactgcaggccccactagcatgaccaggatcttcgccagatcctccccgctaggatcaacatcgtttcgggggaaaccgaccaggaacagacgtccgtgtatttgggtcatcgctcgtcaagattgtcgtcattcgatgaggttgacgtgaccgcttgattattctttgtctccaaacggtcatcattttattatcatcatctataattctacaacctttgacggcttcatagaagaacatgcgactcttggcgtccgtcaaccgtgtggggtttctgttttgagccaattgtttgttgactcgaggtaggacaacaggtatctcgcccttgcgccttgaacgcccccttcgttctcccttctttggcgcatgtatgcaggcattgaccatgtccctcgttcataaaaatcgcgtccatgctttttcctcgttttccatcatgcatagagattctcctccaggtggcagaatgcgacgccaacgcctggttgtctcgttagcaaccgttgtatttgtgtgcatctcccttattctacttagagatacaacggttcctcgcttgtccaacggtctcaatgcgccattcgaggcgaaccctttaccgtcctcttacccgccctccccttcggttgctgtgccaaatcctattgagccctcaaaaggtcgccaagcacttcatccacaaaatgtccacccaatgtccagtctcattaaagatgctgagcaggagtttagccacttgcagtcacgacaatcgaagactttggctgatgcggtgaaggaatatcggcgtcgatataacatgcatcctcctccccacttcgacaaatggttccagtttgctcaagcaaagggagtccaattaattgacgaatacgatactatctatcattctcttctaccattttggtctctagaaccgaagacaataagagaaagagcccgcgaagccttaggatatgacaactctgtgatcggagttctgatcagagatggcaaggttacgcacacggaagggggtcgcgaaggatacgaatggcagcaagatgcgactgtcgacatgatgcaaagctttattcggtacttgccgaacatggatctagtgttcaacacccacgatgagccccgagtgattgtccccagcgacgacctccaaaggctggttaactttgccaaagatcatgtaatccccaaggctttccacgatcaaccactggtgaacaaatggtcggataagcctgccgacctgaataagggcgaccgagttgatgaagtgcgcaccacgcgcttcaaccgatttgcacatcagcctacctggacaagctctcgggcttcctgtccgctggatacccccgcgcgctcccttaatgagagtgaaccagataatctggaagcctatgcgtatggtgacttggggttcatctacaacacgaccgctttctctgacatatgtaatacaccttctcttcggtataagtatggcttcttcgaccgggccaacgcattcgacgtggtccgtgacctgttcccagtgttctctcagagcaagatctcaagttttcaggacatactctaccccagcccgtggtattgggctgataaggtaccgtatgaagaggggaaggatcacagttgggatgcgaaggccgacaaactgtactggaggggctccaccactggtgggtttgcgcgagcaggcggatggcgacgtcagcatcgacagagattcgtcagcaacatcaatactcagagcacagcgaaagtgttgtcaaaaaatggcaacgaccagtgggagctgaacgaggtcaacttcgatccttaccgagaccagttcgatgtcaagtttacatatattggccaatgtgacccgaatgactgtgctgcgcagcaagaatatttcgttgtgggtgagccagccggccagcaggatgcttgggcgttcaaatacctggtcgatatcgatgggaatgccttcagtggccgctattatgcctttctgcgcagccatagcttggttttcaaaattgccgtcttccgcgaatggcatgatgaatggctcaagccatgggttcattacgttcccttgagtttgacaggtgatgagtatgtggaaactacgaggtactttatttcagaagaagagggtaggactgcagcaccacgactagctcaacagagtcgggattgggcgcaaaaaagcttgcgtcgtgaagatttggaggtctggtttttcagactcttgctagagtgagtagttcctccccacatgattagacaactcctaaccttgggtggatagatacgggcgcctagtcgacgacaatagggagaacctgggattttccctttgactgccatctaggtgactgatcttgttcatcatttatctcctgaacccatgtatggctctcttgctctgcattttcgcttctttctttgctttgcttatgtttacgactacttatgccctgtacaatacccatgtcaacatgattgcgaactggctagatgcattaaatgggaggggttctggcgtttttgtatacttacctacactcaatgcatttgatgggctatcctatactgcagagggtcttatcacccctgttgtcatggcaactgaaacatacgcagcatctgctggcttttctgcagccgtagcgatactgacatccatgtccactaacttgtcagatttctgagtagcagtcacggttctggtaagttattttgagacaaagcatgttacacggtatagacttcaaccggtttatgtaggtaggatgaggtcataggacaatgctcgaatgagtctatagtgcaagtccattcattatttggtaggtatcaaacagacgcagggtctccccgagcaaaggcgacatattatttcactgctcactgagcgtttatggagaaggctgcacttttttaagtttgaggtgaatggtaggttccctggcctgaacagtgaggcaagaagggtactccacagaatcacatgcaccagccgttttaaagctcccgcccgcagccaccaaagctaatatatagagagagctgctgggtggcggaaaactactcctcctttcttgaattatcctgagctccaaaatgcacacataatcttctttttaaaagtgcacattcatctaaagcatttgttttctgaacatagagctgaaagtttgctgtcagttctctgctgtctgtctttgagtccctgaacatctgattcttgccaatcgtgtaacggggggtcgcactcctaaagatacacaacatggctaaagcattgtcgggcatcctgaaacatacattcgtgtttgcttatgggctcttcactttgattctttacggactcacagctatacggaaagggttcttttttagggggactactgagaaagagcatctggagctgcagctgggtatgtggtgaattgtgttattcaattgcacttggttttctctcactaacctgtgaaccttctcaatagctcgcgatcgcttctggaacctctcgaagacttggtccggtctctctcaccattatatcatcctgcgaaatggtttcaagttccattatgtttctaacgacccccccgaaggccctgcagctgataaaccattaattatctttatccatggtttccctgatagctgggctgtatggcgccacctccttaaatcgaaggctctgcaggaggcggccactttggtcgcggttgacttacccggatacggtggtactgatagcctagaggaatactcgtcgacgaacgtgctggagagcttggcaggatttatcattgctattagggcaaagtacgggattgatactgatgccggtatacgccaaagaaggacggtgattgtgagccatgattggggctgcgtcctttccatgcgccttgccgccgaagctcctcagttggcagatcgatttatcttgagtaatggtccattggtatgtatattcaatgaaggatgatataacctactatggggctaatttggtgtataggttagcatggttgcctccaatattcgtcgatcactatcttcgtcactgaaaatgttcaaaacagccctgcgttctccaatcaagtctcgctcgacgctttacaaagcaatcaagtcgctgaagccagttgcccgccagttacttctctcggggtatatatttgtcatgcaacttcccatgcccttcgttgtgtaccttggtacaggtggcaactattctttcttgaaattggcccacaagggatcctatgggaactcgccattcagtctcgaagatgctgccgagtgtatggcaagctcattgggcccgtccgtggaggagtgcagaacgcaaacatatgatggtgagggataccctgcttcggttgtaaaggagcgcgcccttggcaatttccagcacatggcccgctactatcgggaaaaggcggctacttcgcgctggcagaaatctatcgaaacaattgccgatctgcacagcatctcgggagggaatgagctccatcgagctagtagcggggctggactgtttgacgatgggctgaccggtgtactaaaagctcattcgactattatctggggcaaagctgatattgccttggatccacaaatatgtctgaatgggttttcggattatctggtccgtaacagtcaggtggtggaattgccccggtctgggcatttcacgccattggagcgtgaaagctgcgctgcattgaccagagctgtcgaatgggccgctggaggtgaaaaggaggatatcggcgctgcgattcagagagattacccggatgcggtcgtaaccgtccgaaagtgaaaacgcattgccccttgactgggaacggctgctgcgatgtcgggcttcgaggtttgctctatgtttgcctttattatacttctttgtatgactaggcggcgtccagggagtacgtaacaaataagcgacgggcgataacgggggtctattatggacagattgagagtttgctgatgatcaaacatacttaacgatacccctgcatactagtaataaaaacacgggatctgagcgcccatggcacgggttctcgaccggactttcggcttccaagcttccacttgttccagcctccgattacttggagcttctccgcttttcccctcatcgtccgatttctttcaactttaggtacctggattaagtagtcgtccgatatacagttcaagcatctacctctctacgactacaacttatgccttacttgattttcccgtcgcaatggaacgattgtaatctgtcctgacgggatgccgttcctgcataaatcaatttggtcggatccatcatcatacaagctcgttctcgttggcgtattttggtgggcggggttaggaggagcccctaacgtcacctgcctaactggggtctccatacattaatacccccaacctgttttcgtcgcttcactggtttacctccagtttcctacttttcaagtagaaatatcgattatcgacgggatggctagtgaagagggcgccgtgtattgcacggtatgttcgtaccgttcccaagccccgaaaactgaaaaccgtcgcgactaacattaaccgcagcttctgttgagtgatcactatcttcctggtaaaaatatggtatctcggcgactgtcaatatggcccgtctaatcaattaattgacctcaggcgctgtcgtactagcccattctttgcgtgacaatgggacaaaagccagactggttgtcctctatacgcctgatagtttactaccggccacaattagggaacttcaggtatgtcttctgttcaatagctcacgcatgtggtctccaccgcaagcatgttgactggcgttatttagtccgtatatgacgagctcataccagtccactcaacctcaaaccacacgccagcgaatctctggcttatggagcgaccggacctcatctccacatttaccaagatcgagctttggaagcaaacacaattcgaacgtatagtgtacatcgattgtgatgttgtggcggtcagggctcccgatgagctcctgtccctcgatatagacttcgcggcagcccctgatgtgggttggccagatatcttcaacagtggtgtaatggttcttcggcccaatctgcaagattattttgctctgaaggcgcttgctgagaggggcattagttttgacggcgcagaccaagggttgctaaacatgcactttcgaaactggcatagactaagtttcacgtataattgcacgcccagcgcaaactaccagtacatccccgcctacaaacatttccagagtacaatcaatctagtccatttcattggagctcagaagccgtggaatatgtcaaggcaggtgtctccggctgaatcaccatacaatcagctgttgggacgatggtgggctatttacgatagacattatcaccctgtcacgactgtaagcttccgtactctcgcattgatattgttaactgcggtagagctgatgaatccaccagataccaagaaaccaatgggacgatgcgcctgtcactccacagcgtaaccttcaaagccagagggaagattccgaaccagtgccactacctgtgcaatccttctactccactccacagaatctgataccagaagttgcctatgagcgcccattggaaatgcacacagaggtgccattcgaacatcctcctgtcacacaaacactgcccaagagtgacgagacaagtgcatatgccccccctcaagcgcagccttaccaagaggtgaaaaatgcacccggtcctgtagagacgcctgttgaggcagtgcagcctatccagaaggaacaccatgataacaagcgtgtgcaagtaccggtcctgagtgttgttccgcaatatgttcgtggagaagagcacgtgtcggcgtacataaagccacattttgacggagcaccgattagtttccatgtcgagcaacccccaacgacgcaagtcaacataccaatcgcttcttcagcgcttccagacaccgtgcactctcaagtctaccagcaaccagatgaacccatgcctgaaatgggtgaacacccgcaacacccgcaacactcgcataaacctcccccaagccctgagccacagacatttgaaccccccaggacgcagtgggacccagctcggtgagttactctaataatcaacgtatggataatttccgaaacttactcttcttagggaaccaccgcccctcaatacaaagcccgaaggaattgctctcgagtcaaagacgtatactatgtcagaggacaatgggcttttcaagccccctcccttttaccccgaggctccgaagaatatgtactatgaagtacccagcaccaaaccggaaccagagaaacttagccaaattttcccttgggagaatcaggcccccaagccgactcgggttttcgtaaatgatgatcaaggatcggtttcgttgcctagctccatgctctctccagtctctccgaaagaaccccccacgtcatccgtggaatacacggcatcctggacgaccgaaaaacgatccgagtcatgggacagctactctaggtcaaatgcatgggatgatgttccagaaatacagagatacattcaatccattgcaccacctaggagagccaaagtccaggttatcggcgggtggggcagctctgcaaaccagcaaactgctggtgcagagtctagtatgcgtttaacggacttccctagcgaacaagagcggcccagtcttcccgttaccccagcccctattaggagaccaccgccttcttccaacgtcctaggcgagaggtccacctcggggcagttacccattgccgaaggcgtgccaaaccaggaagaatgggtgggtgtcacggctgatgtgtttttgcatctccttcgagtggcatacttatactggtacttcacagaacccgtcaatacgtctcgaggaacttcagcggcatcattctgaagttctaaagaacccggatctacttctcgagcggattgaaagagcagcaagggaacgcagccgtaggtattcataatgaaggaaagaagttgattcagcattgggtctcactctgtctccttgtctcatacttcgtttctgttttcatcactacttccactgtatattcctattgtacagtacgttatgcatatgcattgttctcttgtgcagcatgcatggagaccaagttgtccacttccatgtctttttttgggttaagcaaggatatgttggctagcagcagtcgactatgtagtctagcacgattatgttccacatggatactcctgaataaaagcctcctttattgagtcacgtatcctacaccagcatatggagaggtacaagcataagacaccagaaggggaaaaaaacaaaaaatgccaacccactatttaacaaggctataatacaataagaatggataatgatacaaagaccaccacactactgtgcactactatttccgaagagccgaacacctcttccctcgaatagaatagaaattcgactgtttaatatgaaaagccttccccgttcgctcatcgaaaacactaaagccgtacgtcgcagcattaggcggcgtataaagatgcaaggacacagcaacattgttcggatcggggttagatatcttatgaaggcccaatttgtccgacatatacgtaacctgattctcgccgtacgtagtttccctcctgatctgcggcggagaaatctgcccatgctcgagcttactttggtcgggccatgaatacaacgtctcctgcaaagaccctttcaagacctagtgcgcttggattagcccaacacacccccaccaaccttcccttggccaagacgacgagcgagaaacaagcaagaaagggtaaaggaataccttcataacacaatgcgcattcgcatgatcatggatcgcgcttcctttcccaggactccatactaggataagcttgatagatcatatatatatcagcacgtgagtggactccgatcatgcatgcaggtatacttgcatgtgactgatctatataaggccgcacgaggagggatgcaaaccatgactcaccagattgcttttgccgttgccttcgtcgatcagattcctcgtgtaggatttgctgagatcggacagcgcgaacggctgccattcttccgggttggaggtatactggtccattagacgctggatgttgagcgggtcgacatcgtcggagtccagacccgagctcggacccagggctgcacttagatcttggactagttggtcgaaggcgttggttggttggctggtgggttcggggtctgggtctggttggaggtagggcatcttctctttgtttctttttcttttggtctttaatttagttgtgtttgttttttggggtatttgaggcgtgatgttttggtatgtatgatttgggtagattgtgtgttttgatgattagtagttgatgcggtttctaggaatgatgaacaatgtatgctggtataatcaatgatagggtcagtagagaaaggtacgttgcaatgctgaggtatagtttaaagtgatagacagttgtatagccaaagctatggaaggaacatgtccgataacgcgcttgccacccgaggataagcgttgatgcctgatatacgcctgaggccatagtccccgccatgtgatcagtgatcgctctcgttcttctccgcccgactaacggacgaatgaagtggcggccacaatttcaaagattgagactctgcgaaacaccagtgcaaaacgagatacgaacatcttggggcttcaccacagcgcggctggtgtgagataaaagctagaacgtgtataggagcacggaactttgtgacttatttcttattgtatctgagtatattgtgcctgcgaggggtaaaactcgtataaaaccgccaaaatgtcgaccacagttgagaaggttggatcccgcccatagtcttttttaaaatttttataagcactgtttttccgataatgactgaatttattatgctgactggccatgcgtactgtagatcaagcaaatcgaagatgaggttcgtgtcgaaatttataatgcgatacttgcccgccagaatgccggactgaccgattattcagatggcacggacgcagaagaataaggcgacgtcctatcatattggtatgcgcagatgcaggtgctgggtagtctcggtctggtgtgactgacaggctatgcaggacagttgaaggctaagcttgcgaagctaaagcgtgaacttttgaccccaaccggtggtggcggcggtggaggtggtggtaagtgcttatgaaaagcgcacccttttgacatgagttagttcattaattgggtgaaatatagctggtttcgatgttgctcgtaccggtgtcgctagtgtgtatgtattggagacgacattgccaggacgccgttgatactgactcggactagtggtttcattggtttcccttctgtcggaaagagtaccttgatgagcagattgacaggccaacactctgaaggtatgtccagatgtattctggcgcggtctcaataggtgctaatgatttccttcccctttgttacagctgcggcctacgagttcacaaccttgacaaccgtgcctggacaggtgctatacaacggtgctaagattcaaattctcgatcttcccggtattatccagggtgccaaagacggcaagggtcgtggtcgacaggttattgctgtggcgaagacttgccatctcattttcattgtgctcgacgtcaacaagccgcttgtcgataaaaaggtcattgagaacgaattggaaggtttcggaatcagaatcaacaagcagccccctaacatcgtcttcaagaagaaggataagggtggtatcgcgattactagcacagtcccattgacgcatattgaccatgacgtgagtacccagcacgtccacgggctgaaataaaccatggctgacatatttttttgatgcggtttccaggaaatcaaagctgtcttgagcgagtacagaatttcttctgcagatatttcaatcagatgcgacgccacaattgacgacattatcgatgttctcgaggcaaagagtcgggcttacattcctgtcgtatatgcgttgaacaagattgattctatcacaatcgaagagctggacctgctttaccggattcccaacgcctgccctattagttccgagcacggctggaacgttgacgaactgctggagatgatgtgggataagctcaacctcaggcgagtctacactaagcctaagggaaaggcacccgactacactgcacctgttgtgctgagagccaacgcatccaccgttgaagatttcgtatgtaccctctttcccatcacatcctgtcacaagagcgcaagcatgtttactgactcgtgatcagtgtaacgcgattcaccggacgattaaggaccagttcaagcaggctattgtctatggccgctccgttaagcaccagccgcagcgtgtgggtcttacacacgagcttgcagatgaggatattggttcgtaaaaccctggcccctgaacatcatagggagcttcccagctaacttggcgactacagtgaccattgttaagcggtaaacagctttaatcaattaaggttcttgagaccgcgtaagagcggagaacttggtggcgaatcgtcacgagagatcaacgggttgtgttagaagtgtttcgctaagtatacatgtccaagaggcccagcccttgagacagctttcggcgagatgccatagaacgtttgattgggggagaggatggttcgcgcacgggcagcgctctgccgactaccgcctggatttgcacgatcactcgtttgggatagatgactgaatcatgagatagtatgttcggcactgctactcgtggtgatgcacggtcatttttgggcaatcctgtttaaggggacgaggagagacagaaagttgacgctgagaatctggaatagggtttttggttctgcagtacgaacgatttctcctttttccatttttgtgcttctttttttttattattatttcctccgttctcgttgaaagcgaccacttacatgcttttctcccgacggttggtctagaacttctggcttagactactaaaaagttagtaggaacaaaattagaacgattgacagagttgggaaagctccgtccggttcttttgcttccaaggatccgaatgtagcactgtcctctggtttacgcggtcatcgcgtgcaagcgaagaaaattattacacatgagatggagctttgaggactcaagggaagattcccctttgggagcaattcagaacatatgatgtcacctgattgcgtagttggagcatttaccgataggtatattgctgctactaccttagctgggtgaaggtgactgacccacccctatacatgggtacatactttccagaggcacttcccgggatcgaaaattacgatcctgttggttggtatgtgtatgtttgtctgaaacaggtgtggtccaggcattgtttccccacagagatgaagtgaaaagaaagggttgcaatctggtcgcttccatggcgggctcttaagctgaagtatatgaaaccccatcgccgacgaatcggcagtgaagtgccgccatgaagaccgatgggataatttagtggtcgtaggcccgagtgtcagtgtatatctctgcgactaatcatgcgcctgcaggtgcagggtccggggttgctctgctcacgggcgcattatgcatcccctttctgtcctactactcattttctttcccagttctctgattcgaccgagtatattattaccggtactgacgggttacggtgcaggaggggtagtcgtatttccatacccaaccttttcttgtcttacatgatacgtatccgacagattcctgtcaatttgcagaagtaatggtcaggtcttagctttgcatctggatttccatccatttaaggaaatgtctctgtctccctttccattctcgcgggttgcactcggcacttgacttttatatgggagtacataccattcaatggtcgcgtaaaaaagcctaccagttcccttgaacttttaggttccatgttcccatgttactctgccggttccgccggacagatccatggatactaccaacccaacctcgtagaaaaaacttactagaaaaattcaagtaagccagttgaataatgataataatgaaaaggaaattgggaggggaaggagaaaaatcgcagagatttatcgctgacaccaccaatcatggctcttatttgtcgaaattgataatgcacgctgggacttttttcctcggagtatagtacctacatatacatccatttctatgatacttaacggagatgccctgtctataattaactgtcaatgacacaattttttttttcttcttattcctttggaaaagcggtctgcgcgggattttaaagctcggtcactctacaacgttgtatttgtctatctccgctatacttctttggggttattcccccctcgagcttgattcatgcactccttgaattgtatgtcgtacagggctgtgttcggtagtaaagtaacaccaattcgggtggattaagaggttggttctatacctggatggtgcgctattaaacgccctgaggttctgacctggtggcgaggggcagaagaggttcgtcgaaacaataatattaacattaataatcatagtcaagattttaaggaaaagaggagggggtaaaaaagatcaaccaaggtcaagttagaactgcagtggccgcgtggagacgaatacataggcaattatgatcagcgaagacacaaaagagtgcaatgagggtcgtgtctgagcaattattgttcctgatgggcactcgtgattggtagcatgactcggcttttgcactgagatctgatgttctccaatgctaactaatgcacagcctcagcggatggatggaccaagttactactatgtctgagaactccgttattccataaggtgctactgtttgtcttagatgaagaatttgaatgaaaatctgcttgtcagatgactgtagatgcgtggttttaccaccacactgtctgtggcatgcgaggaagtggaggctgcatacgtctcttccttccttccttcttgtggttctcatatctataactgtcggtgacggcttagtactcgggatcttctttcttacttgatttttgcttttttctttctttctttttttttttttccctatctctttttcaggttttccctcgactctccttgtatcattttttagcatgggtatcgcggatccttcgaggcagccacatgacagccacagtctgcggtcaatgagttgtaatggtgacagacaaagaatgttcccaaaagctgatagatactaatttgttgggattgtgaagctgggaatctgattgcttagcttcgctatatcctggttctaattacgaagtgcaattcataaaggggtccaaaagaaacaacctctatccccacaacactcagatctggcagttgctcgtactacactatcgaagtggatattgcctaggctttcgatacgatacttggtctgatcggatcagtttcagctctactgatgtcatactctctcgggtttacctatgccaatctgagctcggacactttccgacaagggccttgccggcgtacatcgccattgctcctgcgtggacggcctcacgtaccatgtaccactatgcaaatgttagaagtagggtgcaccggagtatagtgtaccttgacgtacatttgtacgtatttcggggtaccttgacatgacacgtccactgctgatatcaaaacgagcgatcggacatctgcactccccttcgtacctgacagatgtctattattggcactcctacaacggtaaggttatcacgacgccatttctcggattagggcttgttcggcgtctgacgtcgcaccactcggcccttcgttccagtttcagtcattctcgaccggattgttattgatccactagcaatagtttgcttttagttacagaatcccaatttattatctatttcagtccccatcccaggaaaaatttttgactgatctaaatgtccttgaacaagtcagaaaaacgagggaaagaattacaaaaaagcaaggaggggcaatcattttgcttacactagaagcaatggtgttgacctcaacccatggtctcgacttcccatgctaactctttcctgcatagggtagtgattgtccgttggccattggtttccccagcctctcggcgacaagaagcggcagactgattggaataccgtggtcacgtcgttaattcgtggatagtgactcaaattatgaattcttcctccacctctgttatgtgattttgtcttccccccccatctttagctcgctgagagttagatccacattgggtgagctacactccagaacgcgggcatcattctcctcttttaaccctgtctctacgatcattgcctattattcgattacaaaggcgcgtagcaagagagtggacccgagaacaaaaaaaaaaaaaaaaaaaaaaaaaaaaaaaaaaaaaaaacaggtgaggtctaagctatgaatctgacacagtattacatacaataacttagtcttgacagccctcgtggttatccgaacaagcggggcggatggattggagatgaaaaattagttgctgccccgatcacgttttccgcgctccccgacccgtactctcgactacttagggtaggtaactgagacagagccttagtatgttctggttagtacattatgtacaaaggcgatctccttcgaaggggccagccctggtaaggctgtacaatgcattaatgtacgccgcatcccgtacaatatacccgggtcgcacctacagccgtacataatagtaagtaccgcaatcatccgtcgacgacttcccgccagaaaatcaaccaaccagtcagactgatgcgcaatgcagtaccatccaagaacgtaccgtccgggcgttgtggcagttaataggtgtgtactgatggcgagtcaggaatacttgggggggttgaacctaatagttgcagggggctaaactgtaatgattagggtccaagttctactgctaacccccgaataacaacgtccgatcattatctgcatatcttgagctaactactagtagtgctagtcactgctaccgactaaccttttcacatagatgacaattaatgaattaattaattcattcgccaaacttggaatcggctaatttctttcttattcctcattcttgaactttcccccctataatactaattagtcggcacgcactccactcgtctccttttgtccttttggcctcgtctctaagatttgcattgcttaggttgccggcccggagtggaccgctgcgggccccatggggtcctagctcctcgccctcatgctcgaggtgaaccgtggttgagtaagttatctagtagtgctagacaaaccgaaccatgccgctgatacttcttatgataggacgaaccctccccttcagtcgatgctcagcccatgtaacagaaaataaattgaaatcactctacggccaaccattggctggcaaccatctcctgacgtttttctcgtgacaaagtactatgcagatcggcctggcgatgctaccactggttgattctttggattaatgaggtcctggtccttggccccgtaatgactggctctcctcaagtgaatcttgcttttcgcatatttcttgtcgttctgcgaaggagagcatccccgaaggagcatagtgtcttcctacccaaagttgacacccccgaaaccgctgcttcgatttgttgaaagtctagccaaatgaggcttcatcattcgcaaattgctaacgaaagatctacctccctcttttccctctcaacactaatccatcgtcgagcgtctgatatcgcgggccactctaccatcctcgatatgtggcaaggcatttctgtctcttctttttttatttttcttttcaacttcctagtgatccgcgttctcacatgtggcgggcattatacgaacgatcgaagggacgggggagctcggtaccgaagaatgaagatacttatttctcactgcggagcttatgatgaaaaggaggaaaaaagccgttggacctttcccagatgattgtcggtcgccagtctagtcggaaatcttcgctttatctctaaggtatgtcatgcgggcatttaggttcagcggtttatcgatccgttccccgtccgtgagtatgatcttggcttgctgagaggaaactcttacttccgtatatgattttcgcctgtggacgatcttttcttctaggaaattgtggattatccacttgaggtttctcccgcgaggtgctacaggatcgtccggctcgaggtattctgtctaacggaacggagagaatcattgacaggaaccccgaaggggcgaacgaaaaagcaaagagaattaaaaaaaaaaaaaaagtattaaagaaaagacataacctagaataaaataaaacggaaaaaggaagaggaacaggatgcgccgtatgtactctttcccctctctctttttgcatgattgatttttttttttctttttacatgtcctggattggatgttgctttttcttgtatttttttttcttcccttctggcatctccgctccacctttggatcgggtacccaatttgctcccacagttcttgcctggagtataccagaataggcaattgtccaagttacccgattttctcatttatctaaacttttggtgtaacaccctgaaaatttccgcagtgcacattccatctatcataacatcaagtcaagctcacatagagcacaagttttactattcccaaccgcgttagccatctggaaggaaatattgtcacgtttcatacagttttcaaaccgagcgtcgtatgagcgagtacgtacgagcttagcggtactattcgggctcgagcgacatccctgtccttgtaatctagccagtaaccaatcatgggcgaattcccccaccatttccaagagtattattataaatttcttttttttactttctgtgcactgcccaatcgccgtgcggagtttggtcttttattcgtatggtacgctatctggcctgtcccgtcggtcgtagctcttcgtgtctgtgaattattacccttgttatttaaggattattttttttttaaattttttattattataatactaatattatttttctttttttctttttactttttttcttttctaaagaattttggcaagcacaaaataggcagtgctgaagatggtcctgtcaagatgcaagacctggtcctggtcgaacatcgaatcaggtacgacttgcttggactagaaaggcagtcgcaaccaaccacagagcacagatgaagaggtacatcctttgactccatcctatccatacttacatcgtcagtacggagtatacatctatcttcttccctacgctttctcctgctcctccatgatccctatttactactcgctacttcttccctgatcgtccctgggcctgtgtcccggtctgacccttttaactccgttttatgtcttttttgccttacccgcacccaccattgcccctccgttcatttcgtttttcccctgtacacaagagaataatatagtctgcatgcttcttctgcttcttgttgtgcgcatacactcggttgtgggcgactcgggttagatatcaggcatccaggcgctgcaagaactcatccctcgtgggaaccgcattgttgcttgcttcaattcggcacatatctactactcctaccaccactactactacttgcacggcagcttgtgtaatcgcaaattccttatgctgaacatgcatcctcgtttatactattcttgggtgtagagaaggtccaactttctcagatacctcgccttactttttacctgcccattgagccattgtttccatcgctttctacatatttgttgacggcctggttgaaacctgtcccagtgctgccagaacccatagtaacctaccccttttgtttctcccttctgcatcgtgctttcatgatattcctcgcttctgccgccatggacacagagagcacacacgcccaagataatgactatacccagtcgccttggctggatttgggaggtttcagcccttcccagcagtcaccaccgcttgattaccatgggtttgggtacggcatgctgcctttggagtcggcgtacggagtgtctgtaccacccccgtatgcatcactcccattaactatgccctcgaatacgtggcccagtatgatgtcgactcaccctcagcacccatttccagagggaagcgtgccggcggtgcccataccaccagcggtatcgccagtgacacataacccaccaccgccgccacctccaccgccgccgccacgcaagtcatcaacgagtaactcgacaccgagaaggacgcttacggatgatgatcgtcggcgaatgtgcctgtatcatgaagagaacaaaaccgccaaacaaacagacattggaggtcagtctttacattcactttttctattcaggtagacatcaactgacaaaacatgaacagcgatatttggagtggaacgaaggtaataaacccatgcattaccctctgattctgattcgagtgattcccgctctgacacgtttttcatctgttgaagtacggtgtcgaaagtgctacgtcagaaagagaagtatcttaatccggatgatggaacacgttcccccatcaaacgagccaagggaagagttcccgatatagaaaaggctctttctaactgggtgagaaactaccagcgtcacggctatccccttagcgatgagatgatcagggaaaaggctatcttcttcgccaacacatgtggtagccccgatggcaaagagaaagtgctgagcacaagctggatggaaaaattcaaacacaagaataacttgatgggcttgaagtcccgaaagagctctttcagcgccaagagtgattcggaaagccccaggcgtctgagtataaactcggcgatagcatctgccatacagtcacccagcgtcctttcgcctatctctcccacagggtttgcgaccccttcgccattgtcacccacccagagccaggagaacttcaggccagataacctgcgtgaccttctgggagactatcaaaacgcgcgcactacaagtaccatctctattgataccacatcttctgtctctgccggcgtgaccagtccaacatcaacactggtgacagacagtcctttcactcccgctagtcaatcacacaacccatctacggatagcaatcaaaatagaccacggagccaaacgttccctttcattggtgtcgacccaagtgtgctgtcgcctgatgaacagcctgatcagctttcaccgaagactggactgcagcaagccactttacaagaatcaccatttatggatgagtacaacccaaaggctattcctagtctcgatacctcatccagcacaatcaagcgtaaccgcagcaacccagaaatcaaggcaaaatccatttatccaccattatttccgaagtcaaccacggtttcgcctataagttcacctggctcgccgacccaggatgaagctaggagggcattggagttggtgatgaactattttgagcaccaacccaccggcctgggagcccaagactatctaaccattggagggctaatggaaaggttggaactcgccaagtcccaacagactacgctccctggcggccttactcgcattgacgagcatgatgacggcccgcatttacataaaaagcgaagcattcgcagccttggctaatatcatccgtttggccgtattccacaagatcgatcaatcataacatacgatttgcgatcgggtgtacgacttatttccaagcagttgggtaactgcagatgatttttatttttattgactctgttatactttttaacattacccatatctcgatgcagcatgcctcccttattccctgctttatgggtggccgtttgaatttgacttactgcatttatacgccatgctcgatgattccgtgtttcattaagccaacacaacagtttctgaggttcatttgaaaaacaaaatcagaagatacacatgtgaagagggcgacctcgattgtatttaatcactgatattgatcctagcagatggtatggcatggctcacagtccatgggtggagtatggtttttgtgatgcatgggcttaatgggtatatttcgttattattgctctttttcatttctttctatttccctcattcccctcttttcttttcttttctttttccttttttttttttttttttgcttttttctgtttttctgtattcgagactgttcagacgggacaaacatcatctacactgagatcgctcacgcgaaactgcatgggaccattactatcactacattcatcagcatttagggttttcggacggaacggaacgagtacatgcaaaactttgggctatcattttcctggtgtgttttttattatttatcttctggttttttttctccctttttttatgtctatcttccaaggttccatcactgttaatttctcaccgcaatttctgcgtcatttttccttgatctaattccttgtatatttcttccaattgacgcattgtgccttgtccctgacgacaaaaaaatggggcttgcatggtttggccgattaagtgcatttcattgggctcttcgtgccttaggtgcctcacttacatacactgcctgcatctcgaaccccgccgtgagccaacgccacctgttaattgttctgcagaccttatgaattttttttctttcccaccttctcaattcttactgcatacgattgattacattgtaataatttctaacgtattatgttgtgttaatttcgtccgttaacccctgagccctcaatgcaactggacagggacagggctttcgttgcaggtcacattttgtggtcccgagggagggagcagaaatgcatgaaccgaacgagatccatgaataccgactggaggcctgaaggcctgagaccctaaccaggtttgataaggttatcggcctaccaatactctgttgcgcaacacgactctcaatttagccgaggcagtgcctgtctctaatgccattgatctattgctctaaaacttctgcccaacggggcagggtatcactaagctattgttcactctcggtgagatggtcctatattatagctctctgttgttattatatctatcggtatacgtgggtttcagtcgctgtctaaagacacgccccggtcttccatcaactccgttaggctgcgttccgatagctcggggagaagccttgctagaacggtttcaatgatcgagtagattagatgcttattgcaatactcatcggcgaatagatccagaatgtcgttctcaattgccgcgagaaggagcgactcttccagatcatcgtccgataatgggtcaggtgataaggcacaaactggttccgaatgttggtggttctgttcattgggagccttaaaatgctcttggcgttcagggggcgtttgtccaatgacaattttcgctggaacgcccaagaagcgccgcgcgatgggacgagggaccaatgacaggatgcttaccgcgcaccttcgcttgatggaagcgatttcggccgcggtgggacgctgttccggcgataaggaaggcgcagtcgcggaaatactagtcgttaagacgctactgctggcgttacttgcgccagcggcttcactaggcgggctcgtcaccgtaggggacgctggcggttgtgcgggcaaatacggagccggagcgccgtcttgattcgcgctggccgcctgagtcgagcgagcattcgaagggaaaagtgccgccctggacgcgcggaggagattgggcaataaggtgggggtcaagacatgattctgaatggtctcgtggaggaacctagtggagtcaaccataaaaatttttcggaccagggttagccagacgctccaaacgagagacatgaaatcagcaacagtcagatagcgcaacacagacggatggaggaaggtcggacatggtaggcggtcgaaccccagactgtggagaagcggtccagagtatcaaggtcctttgcctagaaaggaagttgtgtgacgccgattgaagggagggtcactcattgaaaaaaaagaaaaaaaaaaacaaaaaaaaaaaacaaaataaaataaaataaaataaaataaaaataaaaaaaaaaagtcaaacaaagagaggatgaatggctgggtggagacctgatgcgatcggcttggccaatgtgaggagcttgggccatcgattggtgcgattaacaagggcccaatgctgaagatgacgacaagtggaaatggcggcgagactcccagtcgtcatctcgcacgcatccccaagagaaggcattctttccgagccgtaccataggcttcataaggccgtctaaacaccggtgaccgcagccgggattcgaattcagagcgtccccgcgagggatttcgctgattggctcgaaaattagggagggaagcgaacttcgccctatccatgccaatccctagaagtcgcatggctattccctcaaccaatcctaggatgatcgccatgattaatttcatgtatcgttccttagcgttggtttatgaacggcgaactgaaaggcgcccactttccggcataaggataaacggatgaccttcccttgtcgtcggcagggaggcacagcaccaatagcattgtcaagtccattgaaggctatgggattgtctccccatcgttcctttctttcctcatacttattttcgggctcttcctttctttggtgccattgtctggtggataatgtttccagaatgccggagttgcacggataatggagtcgagcgggacggaaagggacgggccagcccattcagagttgattgacaggggagcggacacgttctcccccttcggaatggccgaagccccagtcaatttcgggcagggaatgaccagtcaacttcaaaccttccggttgtagttgagaggacagacgagaaagggggcgaagagtatgacgactatcgtcatatcatcataataatagtagcatcacgctatgatgatgagaactgttcataggctcatcgtcatggagtaattcggcggtaactcaaatacgaacacggtaagttaccagtatgcgccggtcacacctcgtaatgacagtacgaccgtgcaggggcccaacaggcgaatcagggtcagaaactgggaaaacgaaggatggcctgtgcatccacaccaagatcaagtgatcgttgcagcatgcgagcaatgcgcatcagttgcatcgtcgtcccgctgggcttctcgaccatcttccaatgactcgtcttcgatgccctgacaggaaagggtactttccagcaccagcgtcgatcatggttcggatatcgaaccgtaccgcttctccacagctaaagttcccaccctcctaaagttactccgtctcatctgataaaccagtgataagaagcacgagtaacttcgcgggaatgagagaaacgagaaggataaacaaaaatagacaaaaagacactcaaaagtaaatgtacaacttacctgtcaagaacactatccgtgtcacctagtcgacctggacctgccaagatcaagtgttgaaagagtgccaccagccctcccaaccatggcatccgccggggaatatctaatagttgcgaaagcatgccgtatagtccataattgagaacgggacgcttccgaggagggttgcatggagcggacgcctcgtttacgtgcccggtaaaggacgaggacgaggccactggagtggatgcaacgcttaaaatgcccgtcacaatgaaacgtaaggtcacgtaggctaggaagacaaattgaaggattttccacacccaatctgggatccgtaattggacacttgacgacgaatgatgtttctgagagtcttcctggggagaaagcaggtcgaacttttgtaactgattctgtctatgtggtactgcagtttttgcatcaatctcatgactctggcgacttcccaccacgtcaatcagttttgtggcactctcccacaagaaccacccctcgcacatcttcccactaacttgatttccaatgattagatctgccaagatatcacaaactagcgtccgcaagcaggcattctttaaatcctctgttggcaggagcacagccaacaccccgctcaccaatagttgtctatatctggcttcattatcggcttgctgggtgacggtgtgggtatccgtcgggtctgggattggagaaaggctcggatgagggttaagactatgataaatctcgcgagttgagggggtaagaccagatagccgagactgttctctggctagtctgtacgctgattccaagactagttagtaaagatatggctcaacagtccgaagacgattttagctccacccttacaaataatatgcgcttcaattaaagtcggtatctcgtccagaagtagctgtgaaacatcagtgtcgcgcagtctctgttccactgctcgcgtacaatgcgcaatcacctggatgacttcgtggacaagaatctgatccgatgtaatttttgagtaccaggagaagacgaattctttaatgataatcgcgatcaaggcatacagctgacgatccacttcatttgagcttgtaagtggaggtaacagttcttctggggactgtgatgttgatgcgcctccaaagttacctgcctgggaacataggacgcgacggattaaagcggtagttgctttgtcgcctgtcgcgtcagtttgagtatctcggctagaggccttatgtagccggggtcgatgtgaagcccgagacgatggccgcacatttgctgaagctgttgacttggagcgggacgttgtcggcccagctttgagatgtgaaagcggatggagccccggacgagaaggctcgccgctcatttcattccagtgacggtatctaataatacttttccaaaattgaaactgtaagaatatagcaaatgtcggatgtcacatcgaagccgtcgtcgataaggcaagggggcaaatgtcaacaactccaatagtacaaggacaataagttctcggggagtttcttttccggggaagctgcgactgcgatgacgctgttgctccacgcggagattcctctttgggatgcgctcagggcttagggcttcctcatgttgataaggagtccttatcagtgatctccccccgccattgtcatccatggatcagctaacctaacaattccataataatatctatcccctgaatactcattaagttatctatatgcgccatagaacgccgcgatgcactcgtcatctgatatccctattcctctatggctagactgcgatccgggtaggtagattctgagcatgtgagatatagatatacaacctagtcagtatgctaacacagctgttctcaggccacgatgtgagtataaaatgttaccacaagtgtatttccatgaccatagattaacagatatctctggggtatacaggatgcatttgccattcttctcgctgcccaccatccctctctgaatttattgggcatcaccacagtccacggcaatgcctctctggagaacacaaccaacaatgctacaaggatattggaggccatagggcgaccagaaattcctgtatatccaggtcataaaaagcctttctgtaggcctgcaattcatgcgccgaatattcacggtaagtattcgctcttagccactaagctgccttagccaggtcccaagctagacaatgatccctcacacctctcttccaggtgattctggtattgatggaaccgaacttctaccgaaggctacaaagtccccaattacagacaagaacccaattctggcaatgcgagatgccctcctagcacagccaaaagggacaccttgggttatagcaaccgggaccttaaccaacgtagctttgctctttgcgacgttccctgaagtagcagagcacattcaaggtctaagtattatgggtggcggagttggtggaggcttcacagatgcgcctatgagtcgacttgttggtgaagagtcaaggattgggaatatcacccctctggcagaatttaacatctacgtacgcacaccctccagtcctattttttgcctctctttttcttttccataccggcgattaagatttatgtctaacgtcacgttgattttgctatagtgcgatccagaagcatcacagtcaatcttcagcaatcctgtcctcgcttccaagacaactttgatcactcttgacttaacacaccaagtcctcgcctcgcactctgtgcaatcccgcgtcttgcatggtggtgatgacctttcggtgcctccaacagtcctccggcagatgctcttcgacctccttgttttctttgcgtcaacttatgaaaatgtttttggactgactagcgggcctcccttgcacgaccctcttgcggtcgcggttatcctgtcgaccctcaacccagagtatgcgaagcggcatcccgatcaggtcttgaagtttgacgatcggaacggagagcgatttgatgtcgacgtcgtcactgatggtctccacgggaccgatgtcgagctagtcggcgagctcggtcggtcaaaggttatatctggtactaccggagttgcgattccccggggggtagatctggatgcgttctggaatatgatacttgactgccttagacgtgcagatgaatgcaatgctgcgcggaagctggcgtgatatatatatgatagagatcatctgtttaacccttagacgggttatccgacgattagacaagctatgtaagcttatttgcctcccctagagatttcaagacttttgcagatcatttgcgcactcaagagctcaataagatatttatcgtattataactttgtcatataccggacgtaaaccataccgctatgcaacaagtagtactatataacaagcccagaacattgactgcgaaaagtcacagagcatattaccactcccgtataccaccatcggggccaaagaactccttgggctgccagggctcagtgctctgcgccacgcgccggacagtttcctcatcaacctcgatacccagtcccggggccgtcaaagcatcaacataaccatccttgacatcgaagacactagcatccttgacataactagtgatatcataatcaccagcttcggtgttgtaatggattccgaggctcatctcctggataacgaaattaggagtggcaagatcaacctgcatacaggcagccaaggcaataggaccgagaggacaatgtggtgcaatagcaacatcataagtttcagccatggaggcaatccgtcgtagctcagagatacctccgcaatggctgatgtcgggctggaggacatcaacgctagcatcctccaaaaagcgcttcacatcccagcgactgtaaagacgctcacccagtgcaattggacacgacacctggtccgacaactgcttgatgccctccgggtgttcagagagcagaggttcttcaaggaaaagtggcttgtgcggttcaagcgccttggccaattgcttcgccatgggcttgtgcaaacggccatggaagtccagcgcagcatccagacccaacgccttgacagccttcagacgctcgacgctagaatccaacgctcgtggggaatccagccagttcacgtcctccgtggcgttcatcttgatcgctttgaatccctgtgccaggcgtgctttgccggctgcttcgacgtcgtcgggtcggtcaccgccgatccatgcgtagacggagagcttattgcggacctttcccccgatgagctggtgaattgggacgccgagtttgcggcccttgagatcccacaaggcgatgtcgataccggagatggcggacatgaagacggggccaccgcggtagaagccgagacgccaggtcatttgccagatgtgttcgatatcactgatctgttagcccttctgcgtcgtagtgctgaggggattgagggggggaatatactcggcctcgtatccctggaaacgcttgcacagcgcattgagcgttccttcgacggcttctgtgtgcccttcgagggtgctttcaccccagccgtggtttccatcttcatctactactttgacgaaaagccatctgggaaggactcggaaatactcgatggtcttgatcttggccatggtgattgcggggaagttggagaagataacgtggggaaattaatcgttgaacagcactacaggactgaacgaaaggctcaaacttcggattttgtattttactttgaggaagagaaagagaagaaaaaagaaagaaaatctgaacagaaaaggggaggaagggtataacaaatgacattattcatgggctcattcgaagctatgccacgcgagggcgactataataacgtctcggagattctccgcatcgtctaacccgacttaccgaatgatggaacataggtggactatgaaggtgtcagggagatgacgttcaacacttcgtagggtgactcaaaaagctaggagctcaagaggttctaattctaactcaggatatgaaagtgtagttgagcatggtatgcaaggggtaaagtcccaaaactccttctgtcaacattctcgaaaagaccgacaagttcaacttgtaagagatcatagaatgtgtgcgatgcgtagcctttatacctggagaaggcgtagtggggaatttctccagtagaatcgacgagtcgacataggacctggttgtacatacacttctgaagaaggattctagaattcgagaagtttcccgctgcatgtccaagcgagcaataaataattgtcggggaacagaataaaaggcaaatagtacccagtagtgagatggggaaagggaatgtaatgcctcttctagcatacgatttgacatggaatgaatagggctaggattgaatcacgttccctgatactcccccaattaggcaatccaatggacttctccggtttttcgggtgattttcgaaaactcccaacttaactcgaatcattcaatcttcttcactcttgttacattcttcatcttttcttcacccccaacctaaatggtttcctactatcccagtcaccctgaggagaggtagtagtatctgccactcactgcaatctttgatcgcatgtttgcccctttccctccatctgcagatcttcgacactatcgtggttgatccgtcggcggactgcgcccgccactcaaccgccttcgcctttggacagacatgccgccggccaactcgccttcggtaggtctctctttgttttcttactttcggttctgtgctgcgacggggtcgggaactatacatacatctatcccctttccaaccgtgggaggacaccgagagataacgccggagatggaatgatggatatctggttcccgataacgtgattacatgtgctccatttgaaaccgatactaccatatcatctctccgtccaatatctcatatcttcgcagcagaatacccctcactctccttccgcttcctcgcttcaacaactcagcgtcatctccactccccttccatctcttccagcttccgtatccgacgatgctcatgacgataacgtgagctttctgcgatctcgagtgcgctctccacccgattcctcctcttccctgagtcgtcaacgccgtcgtcgacaacagaccttgccagagctcgatcccatggatgtggatgatcctgcggctttgcgcatgtcagtcgaaatcaaccgtcgcatccccatcgtgcgccgtgaacacgattcctccaacagcaataacaatagcaacagtatgcctaattatgaaggtcgcatctccaaccctcgttcactttatggatgggcgcctgcctccgatgacgacgatgaggaggatcacgatatgacctatggaccacttcaggatggcaacactatttcctcctggtttggacggttgtctgatcgcaacgcgcctagacgtcctatgcgccgcgaccccgtcgctcaagatccacacaccttcttagaagcacctccggaaagcaacacccaacgtttgagcgatcattctccgttgtcgacaacagaggcactgttacaatctgtgcgacgccaaccgcggttttcccggacacggacattgcataactatctattggatcgtgaaagagcaagtcaggacttggaagagagcagagaacgatcgggcactgccgctacgtcgcgggcatacagattccttcctagtaaccgtggtgaaccgcaccgactccttacacacaatgagctccgcgcccggataaatgcccatcgacaactgcatctggataaccctcctagtccacggttaaaggagaccatcaaatacctcgaccgtctacgatattcaagttccttcgaagaaagtctgacttcggcggccgctggggggttcgttcggttggatttcttgccttgggatgaggatgattttattctagatacagcttccattgcgccaccgccaacatgttcctggctccagcctgggatggttttctcgggttctcaaagggctgccagcagtgccaattctttctctgccccgcgagtatcgagtccaccatcatcacacgaccccctgattgtcaacggaagtgaacagagcggcagtcggatccccgtacaaacaaccagcggtcgacggtacatggccaacaatatttataacctcggtactggtagagacgagaactggcccgtcaaagtcaccattcataacatcaatccggaggagatgaccctctcagggaccatggaggcatacaacattcccgacaaaacatcaccatcccacgatgctcatatagttacatttctagaaggagagatcatcgactttaacacccatacactcgaaaccaagaatttcaaagccgatgccgagatcgactgtacatactggcgtgaactacaaccgttcaaaaacttgtcggatgatgcgatgacgcggagccttgtaagtcggaaatggataacagaggaactgtccaagggttggattttgatgagatggaaaggcaagcttctactctagcttccgtctgggcccccagcattgctaacccaaacacagaacgttgtttcattacacccaccgactcacgacagggactcacgatctctgggttttattacatctccctgcatcgcgaaagcggccatattgagggactatactatgatccgggaagttcaccctaccaacaactatcactaaaaccggagagtaaaaggatggtccggccatcctatagtttccgctaacatttacattacttcctaccgatttggcgtaaggtcggcctcttccagcaattcgcatagcgtgtcgtctctttccgcgtggcagtttcagtaattatttcgtgtcacttacacactcgtacatcactttgcacagctccacaaatactcatctgtaccttatagaacagacaatcctacataccaatctacaatgtacataccacgggaaagatattccttcaatcgtacatgccattggcctatactaggataaaaaaaaaaaatagagatcatggtccaaagacaggcaactcaaccccaatcaacagaacagtgatgagacatagggaagacctctcccgaaaacagaaaaaagaaacccacaaacacaaccattccatcaatcgaacccgaattagcctatcatgaccccacaatccctaccctacctccaaagagcgaatttactgctcagtctggaagtagttgaggaggacagagcgctcctgggactcctcaccccagtccttgacaacgacgcaagagcagttgacaaccttgcgagcgttaccctcacggtcaagctggcctaaagatcacaatcattgttagccacacaatccccaactctcacatattttcgaccaagcgtggttcgctctgggggagaaaacatacaaagaccgacccattcaccaagcatctttccatcgggaaccttgatgagagggatcttgtgctcggagcacagggcaatgacaagcttcttgtaggcttcctcctcacagccctcgttgaggacacacatgtgagcctggcggcggtcaagagccttggcggcctcacggagaccacgggcaagaccgtcgtggatcagggagatgcggaggacacccttgagggcgtcgaggaccgacatctggccaccggcgccggcgtcggcgctgacctcgacctcatcggcggcaacaacggggttggaaacagtctcttctccgtccgactaattcattgaaagatatgttagttttggaagtgcctttttcaaggtaattttgtatatgaaatgcgtggtagtggtgggttgctaggtcgccgtctgtcgtagctcgctccctcgttctccatctttttttttcttattcgttttctttaacgtagcgatgcattgtattgcgggtgtgtggtgtagggtgatgatcgagtggaaggggatcacataccattttgtctgatggtgttctccttgtcggattatcctcaaagagtgagatagataggtgtggtgatggagtatactagagggagtgtggaaacggcgatgaggtttctcgcctaaattgggaccgtgtgccctaccgtcgtattatgtaatcttgcgtttatcgataagaagtcacatgagagctacccgcccatccacgtgacgtgttaggttcggcgctacaatgaggggtatttgcatctgcactccatattatttgttacagcgtgagaattgatgaccgctggtcattccattgtctatccaaagtcctatcgacagacatcacacatcaactaggtatcatagtcatacatcaaggaaaccttccacctgtacaggctgtcctcataaatcgccggacaaatactcttagaacactgaaagaaaagaaaaagacattagacgtatgtacttggtcggtgaccatagccattggttaggccttgcactccattgggaagcccagctgtatcctcaacatgggaaggcccagaaatatgcccattggcttgtggaaagctgaacgctagcggcgccgtaggttcctggtctatatgcatcttcagaaactggaggtcgagtccatggagatgagggatgtgggggacaaggtccataaagtcggaaagctgtatgcaagtcagcaaccacacctggcgttgcaaccaagcaacggagatcaacgtaccttaacccaaaacacatgttccatatcgaagtattttggtcgcgcttcgctatccttctgcatgacttgtccaaaggacgagttcatgaaatccgcgtcatctgcctgaacaagcatccggcgtgtaacgcgccagagattcatccgctgggtcggcgttgcatcacgcttttcccagctggaatactgtgcgagctgaaggtcatttgtcgctagtaacggggcaactaggtaattaggcacccatttctctacggcaacgtctggggcacaggaagggtcgagctgccgagtctctgcggtgacgacaggcatgaacttcttcaaccagaggtgacttttcgcctgtgggtcattggaccccaccaggttagctgcaatgcgaagtcgacttggcaaagcatctcgtcgtcgctgttctagctcttcctgctccctgcgtactttagcaaggcgtagcctttcttgctctagtcgcttctggcgctcatcctccgcttgtttgatgcgtcgctgctcggcctctttgcgtttgcgctcttcctccgcagccttttccttttcctgagcaaggcgagccgcatgagcagcacgttcctcctcttctttgtccaaccgagctttttcggcttcggcagcgagacgagcttcctctgccaggcgttcttgtctagcctttcgcgcttccttctgtcgacgagcctctgcctctgcctcagctcgttcggtatagtcgtccataggaatatcgttgaggccgttgatatcatgtctctcctgttcctccttaaccggcttccgttcaggtgccttatgggatgggttgtccgtttgacgtaatggatctggtctggactctgcatggtgatcttcatcatccttccggcggggcttggcatcccctgttgtgtgatcctttttgaggcctccattcgtgatgttcggggtcccgtcttcggacaagacacgtcttttcttctgaacagtatcacgagaatgccgctcgggttccaaggcacgacctcgctccgggctagcgctgctacgcccacgtttaaggggtggtggtccggactttgagggttcaaggtgatcaatacgcgcttttgagctttcgtcccggctcgacaaagaatcggacgagggtaggctaggcctccttcgatcttggggaggtcgtccagcgatcaagcgtcgtctcttaggggcttcctcgccacgactagactcaccctctcttggtggaagcagctgcttcggtctgggatccggacgagcgctatcggggtcggtaccagtaggatgagccggtttcggacgggctggattagacttctccttcaaatgagctacgttgtcacgccttttctcttttgtcaaggctgtatccttggaggcaggatccctatagcccgggcttccattggtttttctgggtcggcctccaggtgaaggcgaatctctgcgtccagggcgcttgttctccttgtctttatcacgtgctctacgtggcgagtgaaggtcttgcttgcgtgactttttggttctgacatgattgtcatatgcatctcggaggaggtcgtactcgtcctcccagttttcagctcgacgttccctagaaagctcgaagtaagtccgatccctataaaggcgacgggtggggttaaactccggctggttgagcagaatcctgataacagcaaggttgcctcttccaatcgcagcaagcataggagtgttgtaaccaggcttttgggagccgccctgcaccggatcgggatcgggatccgcgtcacccataccgagcagaagcgagatcacctcgtcgtgaccacctttagcagctgcaatcatagactcaggatcagccttttgccccacattgaggatgttggcaacccccacgatatctcctttggcagcgaaagcttgtaagttctctggagtagctgtggtccacaagaggtcattccgtgtggcctcgcttcggacagttttgcgtttcgtcgtagcgaatggcgggctacgttgtctattaacaggtggcgattcgcgtgcactttcagcagaaactcgtcgggacgatgtctctttgttttcagatccagctctctcctcagaacgacgactaggtcttgggttggctttagcctgtgcaagcacccgacgaatttcctcgtaatcttcactgtcagatggaaccaaatcatatggctcatcaccttcagcattaacaagacggggattggcgccggctgccaacaaaagctttacaacatccaagtgcccattttcaaccgcatcaatcaacggtgtatccttgtcaatgttcttggtatcgatctcacaaccagaatccaagagaaacttcacaatgggtgcacatccttccaaagacgcaatctgcagaggggtattaccagcattgtcggcaacatttaagtcctctgggcgttccgcgtgccttgccatggctgtctccaattcttgtgctgcacaagcacgtgcaaggcgtgtacgaccattctgatcccgctgtttcttgtgacccgttggcctggcaggagaagctgaggcaccatcaaccgatccaagttttcgaagatgcgcactaggtagcggagatccacttgtggatgatgatacagactgtcggtcttccgagctttgtcgagcatatccggtaacaagtggcgtcggtgccttcttcttgcgttgcatatcaccaagctggggaccagaagcggttcgcttgtgcacagatcggactggcgaggctgaccggtcagtcgataccggccggggaaacgttacactgcttaaatcttttcgctcccgttcacgagatactgcgggatctctcaggcgagcaggacggcccgcgtccccctcaccatcgatagtctcgctgaagctgcgctttctcgaggttctgggtacggaggtagtcgaaagttctggtctactcgaaagagactgcacatcctcaggcttctctactttcacaattgacggcggagatcctattcttttcttcggactcaggagacgtggaacacggtcgcgtccatcggaagaatcgctatccgtcaactttctctttcgcacctgcaggtcgttaggaggaagatcactctccacggcatcaacatggtcatcatcatcacgtcgtttcggttcatgctgtatgtacttccgtctcttttccggcgacagggactcgcggcccgattgtattatggtttctgcctccgagtcagccttggggctgggtggcccttcgccggccccagcaacagggttaacctctttggcgcgatcgtcctctctcctgtagacagggaatggagaagacctcttaggggaccgtggacctgaaggagatcggtggttcaccttgaccgcaagagcactgtgtccggcatctagggcagctggcagggaggagacagcatcaacatcactcatagcggtggcactcgatttctgggggttccgctcgtcattttcgggggccgtggcgaaaggaagactcgtggtcagacaccagcaagtatgcgcggaagctggtgctcgaccacgctagatggcaatgaatggttttttgggtcagtcctttgggtacagcggaagcgataattctcggcgagtggtgaagaaggcgcaggtaacgagtcgaaataggaggggagcagcaggagggtaagagacgagtagatttagaattactcgggaagagagttaatgttgcgggtgacggacaaagaggtgactgaagaggaaggagaaataaaataggaaagaaggaagaaatacagtcgacaaagagagaagaagataatttttgaggttcaaggtgggagggtaaaagattggggggaggggattgaaaagaggaagaaagagagaagagaagagagtaaagtcgaagagttgcgttgaaacagccgaccactcgtttggggtttagggaaatttcgtggtagtaatttagcagtacgtagtagagcagaagcagtagtcgcagcactggtctatcgtccataagcgggttggtggtaatggtaggtaataattgccccaggaaacttaccagccgggggctcctctcttgttttggccaccaaagatagagaagcaccaatgctttttcgctaactcagaaaagacctagttataggagtagttgtctaccaccaagtagtcatgggtgatggtatgatacggtacgagaaacaaaaaaccccatctttcattatccactaaggacgagaaaagtacgtttcttgatcacatcacccaaggcttttcttttttttttttttctttttttcttacttttcttatctgtggctatgataccgataataatggggtcaatcctataagtcccatacttccccctctttgaatgcataacgaccacgataatacgtaatacttacagatgcagccgcaacggaggtacagggaggcaagatgaaaggcccttccgagtctcaagatcctgtgcgaaggcccaaaaagcgggcgggggcggtcaaaaagtggcgtatgaatgaattaattttctctttttttagggtggtggtgcctctgaaacctgcacattggaacggagggcgagaagtggtgcgccagtcaccctctttgcagtggactcttgagaggaatccctggaagctgcgtaggctatcagactacctaggcgtcaatttgcccagagagaaccaatgaccgggcacaccgtcgcccgctcattgccgtttccggcctagacggcttctctcccaatttggcagacccacgttgagtcgcagcgatctgctgatttccgtccaataatcatgccgcataactgcctggttatcgccccacttcgccgccttctctggttggcgtcgacttgggttattggacccgccgatggatcggccttaaaggagaagggggaaatggtggtaatgaggaatgtaccaatgtaatgtgcggcggtattttatctgtgaagagtcattcctccgtcccctcatgaatacttgcgttgtttttcttttctttttttttttttgctttcttttttctctcttcttgtcgtctcgagaagacgttaggggaaatgacaaatgcaggaggtcagttggtatgagaaaacattcgtttgaattattcaaaatgaaatgtgttgtttacctacaactttactgactaataattactttactccatgaataccaaacaaagaggcgaaatttagagctagttcatgttattttctactggcttctcacgagaccacggtggaacccaaaggatgccgattattactcggtttgggggtttgtttatgattttatgactgctcatcttgccttggcctgtggagtctcggtggtttttgttctccacaaacagcagtcgaacgtgtctcatcgttgtgacagaacagggaccatcgtcagtgtaagtaatgcgaatacgaggtttcacctgcgggcaaagtccagatcgcgtcctggaaccattccatgagcaaaacaaaccccagagtggtgtgctgtctgtcgaactagtcttttcaagtttttttttgatcttcaatcaatttccctccgcccatcatctgcgggttccctccacgtaggggacaagaactttcatgaccatggactttcttcccagtctcgtcgactgggcactggcgactgcccacatggacgcggtggatgtccttcgagctttctttctctttgcatcgtgtacggtatgaaaacatgttgacaatgacgtagtggcagaacgccgagcatcatacggcatcagtctaccaaatatttttttctatctaaaatggcttcaaaactaaactccccagatcctgtcggtcagcctgttggattcccttcgttcgcgcttcgtcccttatggcgctcgtgcaaccgtgacggccgagtcggatactaccccgtctgagccttcgagcagctcccccttaactcacattctcgactatcttgcctctttgaaagttccacacagctatttcacacagttctacgtcgtctccctgctatcctcggttttctgggcccttcagcttatgtgccatggacaagcgttccaagccatcgcgacgagggttcactcggaacacctacagaggacgatgtcgatcaaccagattatgttgtgctgggtactgatgctcgcgcaaggtgtaagacggttacatgagtgcttcaccttttccaagccttcttcttcccagatgtggtttgtccactggctagcaggcattgctttctatctagcagtctcaatcgccctgtggattgaggggacaggtatgcagttcccgtggccaagcacgattgctgtcccgctaatttcgatcggttcgaaattcacagaaacgctgttgtcccataaattgagcctcgacgatgtaaccgtgaacaacgccccaagccttcgtacatttctctgcttgccaatctttctgtttgcatctggcctacaacatgacgcccaccactatcttttctctctcaagaagtacacccttccctcccaccccttgttccgcagcatcgtatgtccgcactacacggctgaatgtgcgatctacctatcattggccctgcttgccgctccccggggagagatgatcaataagacagttttgtccgctgccgtctttgtcacggtcaatttaggcgtcactgcgtccgagaccaaacgctggtacatgcagaaattcggcgagagctcggtgcgggagaggtggaatatgatcccttgggtatactaatgctgtagtattgaaacatttgtggagtcgttcatccctgatgactggaggtgcgggcagtatcaccgcccacccaggaatttcatcgtattgcccaccttcgcgaccttgagaacatcgcgatacgtcagactaatcctagtctccctttcaaaccatccacactggtatcgaacctgttcccgcaacaaaccccagttacatatagattcagggcctagcccttcatccctggttgtctccgcgataccgtgcagatagtctgtgtagatctccttggttgtaaccaacaaacttcggcgctcctgcaagatacgctgctgcggcctacggtcctcgccgtccaggccctgacctttttggtacaagtccaacacaatcggtgctcccaaactcaccgtggcaactagcgggtaataagcagcaccatcttcatgcggcatgataccctgtccggggcggtactcgttcactagaacatggttcggggccccgtgcggggcatcagcaaatatgcctagcgactcaaagcgagggatgacgggtgagacgagccaggatggaaggggagaggaaatgagggcgttggacttggtcagggcagagggccatgtttggagacgacggtgggacagatgagtccagcggggcagaggggctgtggcaatctgttatgcatcagcatcacaccaatcagtatccaagtctcgttgactggctatgctccgtacccgggccatcattccaatcggcgtagccggtagacagggacatgtcagtggaacactaatgtacagcatataccttttgtaacagcacctcttcctcctcttctgtgataaaatccgctatgtaaaacgcatcatccggcaacgacttgatccgcaccgtctcgagatctacattcatctggaagcgtacactgcactggtccttggtacagatctacaatcccacccggtcatcagataatgataaacatttccaaaaccaggatatattggaacttacctttcaataaccttcaagactaataaaccaacaaaataataatcaaccccacacatcaaacccagccggaacagaagggaaacgttcgagtaaagtcatgtcgtcacctggaacacatcaagtagagacggaaatcatcgcctcaggcatccggacaaccccccactacaagccccacatcagtgacctcaacatcagatctcaatttgactgcccataacaagatctcgacccagcattcacccagatatttggaagaggcaaaagataagcaccttctcgaagggtcgaaaaagcaaacccaaaattttaatttaaaacaaaaatacagaataaaaacaaagtttgaaaaaagaaaaagcacttaccgttacccaaaacaacacgaccaagatggcgcccaaaaacaaaggcggagacaagaaaggcaagggaaacgatggaggtgataaggggggcaagggattgaaaccagctacttcgattaacgtgcggcatattcttgtatgtatttcccccccttttcttcttcttgctcttcttttagtttgagttcggggcaatatatataaaaccggagtagggggttgagtcggttacgtgtagattgactgccatccatgcgttaataacgttatggatatgaaacatttattttctaatgatactcggtttaatttagtgcgagaaacattcgaagaaggaggaggctctggagaagctccgtaatgggtctaagtttgatgatgttgctagggagttttccgaggataaagcgagacagggtatgtgttctttctttctttcgtctcctttcctttctgttgcgcttgttgtgaatgagcggaggtgtattgatggctgtgtataggtggttctcttggctggaaggtccggggaagtctcgatggcacatttgagaaggcagcatatgaactcgagcctagtacgacagcgaatccgaagtatgtggaggtgaagaccggatttggataccatattatcatggtcgaggggcggaagtaaaagataactttcttctcctgtgcaaatattaatcctttcaatctccagggaatggagactgctatatcaacaccgaaccaagataatggaactcacgaactaatcaaaaacgctgtgattttatcaaaacagtctatatatacatgaactaagcattactttactggctctttgcagccttcgcccgctctttcgccttcttctcttgtctttgcaccacggcctcggcaccaatgccaccgaaaacaagacccacacccagccactgtccagcagatagagagtggccgaaccagaagacactcaggagcatggtcagcattttacgtgtgacagtgacagtaaccaggagcagagacgaaaagcgggaaagggtgtagaagataaacagctgtccaactgcaccgcaagccgcgaaacctaagacatgcttcagagcttccggatgcctcgacaggaaggaaatggcggacgttaattctgtctcagtagacggcggaatgggaatgggaagaatggcgtgcagaatgccggtggacgacaggtggggcatcacaagaagatacgtgctagttaggagagtcgagagtacattctgcgctaccatcatctgcggccccgtgaagcgggtgtagatctgtggggaactgaagacatgatcttgagtagtgttcgtgaggccgtccaagagaagattgatggaaaggaggaaaattccccacatggacgagccggactggttctttgcagctgatgcggcgaccttcttgcttgtacccgggtggtggagtgtgaaagtcgcgactccgagggtgaccaggagaacgacaccatatttatacaaggggtaccttttccggaagatagtcaaatgcaggaacatgactggcaggagcttgcacgattttgcaaggataaatgtcaaatagtcaatatgcgcaagactggcgtatccaaacggcgacgcaagtgacgaggaaatgctaacgaggaacagagggaacaatattttcttggtcgggaagatcgatggtatcttttggccagctggggtcgagaaaaaaaggtacaggaagccagtgatagcggcaaatgtagactggattgtgttcaagacaatcgagaacgtgaagcgctcggtaggaggttctggttcagcagcagttggaggacggacatggtatgaaactgtagtgatcgcttcttgaaggacgccccaagagagacttgcgcaactgtcagtcaccctgcgaagtgagagctaaaggtaattcaggctacttacaacgatgcatagatcccaaggacacaaatcgcaagttgcgccaaacctggagtctccagagcagcttcgtgcgcgacttgtcctttggaagcactgccattggcagcgagcttcttagcattgccattctgttgctttgcttgtgaatcggttccctccggggccatgtgcatcaattcagaagaagtggcccgttgcaagggcgttgcttgcttctggcgcgccatcgaaacaagctatagtaaaacaagttcaaaggaaggacgaagggaattaagtaggattaaacagaaagagaaacgaagggaaagtctctacaagagaatggaagagaaatgtgaaaacataggtagaaaatgagaaacaatggcagaggtctcagggccagatataagaaagtccaggccaatgatgccatgtgttcttctttttcccaaagaagaggaacgctaacttaatttcgtgaataattaaatcggattttcgttccccacttcaagggaacttttcctctccaccaccgttagagaagttcggtacaagcaccagaagctgaaactcgccttccgattcttttccttctcaattaattgctcatcccagcaattcagcctcgattcttgaagcaatctgcattcacgttttcgcgccgcgcattccacacgcgcaacaagtgaacgaagggagggggaaaaggaaaaggaaagacagacaaacagacaaagagatagagaggcgacgactgaagaaccgaaaggggggacaatatggcatcaacacaatccactcctattgcgacaccagagctatcagctctcaccaacctcatctccacctccgcatcctccgatcccctctccgcaagcacagtccaaatcctccacaacctccaacaccagcacctatggacatcacttcaagtccacgatctcaaggactcaaatctcagggcttcaccgctaggagcagggctagcaacgacgccttcagaagagcaaacagtccctcggtacctaatctccggtatacctccacatcgagtctacacacatccggatgagcagctatacctactagaacgaggactccgcgaagaagacatcgaactggagcgcatatttgttctaccaactgttaaaaatcaaccgtggagtttgcgcaagatggcgtcagtgttggattcgcttcctgacgaggcggacattcaggctgaagaatcttcaatgaatgacagtgaagaaacaaatgatggggccggtggtgaaaaaggggtcaagctggtagagtactacgagtataggaagaaggctcgtctcacgaaggaatggggtggaaagaggctccttcttgccatggtggatagggggatgggcggtgatgggaccgtggtctattatgttgttcaagagggtgctgtgaagcctcggcaaaattagaaatcctccacccaaaattgcagttatgacaccggtttacgattcactacattgaagtacaacaagaggtgcgatatcgtatcgagtggacgagtatgttccacaacatgaaaggttacaatcgaccccttaatctcttcgatgtgctatacaatttgagctatacattcaagtgctaaaagatgggattgtcttggaacacattcatgagacaaaacagacccgttaattgcaatagggtatcgttcaaacaaatatcagaggacccggaatacacaaaatgacacacaaatctctgccgcctactcatgaactgccatatgcacggtgattctcctcgactaagtcttgttcttgatggcagctaaaacaatacctttcgtaccattccctgatatcgtcggataaatcagcgaacgcggcctggcttgtccgatccacctgcatgtcaacctggtcggtgtcactactctgtctgagtagggcttcgatttggtcacaacgtttcagttcttgtcggagccaacgctcccattcgttctggaggatctctctttcgatgctgttcactacgcggaggcctaccacgaggtcatgtcgatgcatagctagacgttcacgagtctgctggagccgtctggctgcgctctttgtcgctgaatctctcgggccagacgtgctgatggacagcggtgttccaacattccgtattgtttgctgatggaaggtggcgaagcagtcactcacgtcgtcgctcgcatgtccgagggttgagtttgcaatcacttcatcgatgtccctcatgtaaatagctttgctcatgacatggtccgggtgaactcccagacgagccatgaaattctcggctttcctttcgtaccaccaatcataggcgtcccgtgaggtatagaatccatttatcagcatgctggatattaacaaggcaaggataattagattagcgtttgcagttttccagacccagcgaaagagggcaaacgtccaaagcatcacggacgatacggcgctttcgaggaagctgacgaacgtctcaaatagaagttgggccaacgtcctctgagtgcgaggatttcgaatctctatcttgaagtctgactcgcctaactgtgatacggtgttctggcggccgacgtggccgaagattgcaatggctttcttggttcggctttgtgcaccgagcctgcgcacctgctcgctcacgagatccacaagatccagcgcatcttgctctaggtcaccggttgcttgtttgtcaatgacacctggtaatcattagcggttatttatgcggacctggtactgtcatactcacgttgaatgccatagggagaccacaaccactccaccttagtatatatagcaagcttactcttgcccttcgcgacaaacgtgatcacaatcttactgaccagcctgaacgagcgcttaaagggaagatgccagggagtccgcttgtccgttatcacgtagcacaagtggtcattaaggacatctatcatctgataatcggatatggtctggccgtgcttatgacctagtacatggcgtattagttgtagttctataaatcatatataggtcgattcacataccaagcatattcgttgtctcaatttggtacttaatatctcgcctcaaatggttagattcattgcgagaccaaggtccctgcttgatatcttcaagctagttagtaatgctctacattccatacgggttgatatagcttacctcgagcccttctttggtgcaaaaggagctgccagacagcgctcttatcgccgaatagaatatggaaaatcgccttagggctgagatcaaacaccttctctgctgcaagatgaagattgccttgaggaacatattggactggttgagttggcaatcgaaacttcattacgtccttgccgttgctgcccttcttcgaatgcatatctagacctttctcgatgtagatagccggccgaatatccttccggggcccttgagctgcagcgtcttctccagaaaatttctcgtccacgcccacgtcctcccagctatcaacgctaggagttcgtgttgccgcatctgcttccattttattcagagcattaaagattgcttcaagccccagaggttcgacagcggttgtatcgtcaattaagaagttgagacgtctctggaggagtttcattggttcgaggaaggtcttcaccgtaattcggcctggggtgtcttcaccaggcctcggaacggtgtgaaggaataaaaagtcagaatctcttccagcagcggctgtcacttctttgatactctccaatgagacacttgttgttagtacaagcccaaaatagtggctatagaagtataagtcgcgggtcgtaacataagctctcccagggaattcttgttgatcattcatagtatatgtagctcggaaaaccataactagaggctcctcctttttgacgttcgggaaaagcagccggaattgggcgtcttgaatcttaagttgctgcggataataactcggatactcatgcgtaacccctatggctgcacgctgcacttgggaggcgttcccgtccagactaacagtctgtctatggcggggcccaatcttctgctgcttctccgcagtgccaccaggggtattcgcttctgtcgacatgacatgttttgatgagtcactcatccgtgaggatggtcgttgttgagagaccgcatcctgttccgcatcgggtaaccccaggcgttctagttcaagtctgtttacgaagctccagttggagctaccccacagattcgccatcataccgcttggcatgccgccagtcttgtcagcatgtcccagcccgattcctctttcattgctcacgataacagccaccttgctcatacttgtaggtgcagggggggttgctagtgttggtggagcaagggttgtgggaggatcaaagcggttggacatactgcgtcccctgttcgggtcactgtctgccatactagaaggaagtgcggtaccagagactagagcattgtggctagcagaaataaggctgactatcccacctcctgcgcccggtatggatgtagaaggttgtatattgttgttcgttttgcggtggaggtccagtttctgaatgattcgagatgtatgttctctaggggaagtctcgcaatcaagtccagtgaggcgtcggctaatatcgctactgtttcgaagagaggcagggtctctttctgggagaggaagcatgccattgcggtccgacgaattttgttcgtcgtttgagtgaggtgttaaagagtccgctgggtcagcagtgaactctggggctggaggttgagaaattgcgaaagccggatcttggacagtaacttttccggaaactgaaagatcggtacttgctgggttttccaaagcttttcgtttagcagcctcaaaagccgatatccattccatgagttccttttgagtctcagcctgcaacatgatactgttgcttttcgtcttcacttcaaagcaaaaccgcctttcttcttggaatgccgctcgaacgctgcagagtaaaacaccaatcctttcactttcttcaacaccgccagttcgtggaccctgcacaaggcaaccaaatatgccattcttcaagaatatccagcgtctaacccaagcagttcgtgtaggcttgccgtaaagtgttcgcagatacacccatccctgtttttcaggcctggcttctttcgtcatgctaagattcgataatgggcgggacccaaggtaaggaacggtggacacagaatagtcgtcaagctcacgagaaggtctagccgccgtctccgccgcttcttcaatttccttccttgcagaaaatagctctcgcttggaagacctttcacttgcatccatttcaagtacccaaccttttatcctgtccatctcatgatgccacttggcaaagcctgcgccattgatttggaagaacgtcttgaactcccgccattgatcaaaggatacaccgaccaagagccgatcaaggccgttccgtacttggggggctagcactgagaagtccatcgaagccttgagataagctttgcgagcctcgtgaagttgaaaggcgtcttctcttagagacgacggttccttcgatttagattgcgatgaatatctagataagaggtagtcataatgtttttgtgtttggtcgagcactcggcgggtttcctatagcggggttagataccgatagactggccctgtatgtgcggtcctagggtcaccttgaagttgcgtaaatcctcttgaataaagatcctgataggttctgcaaccaacatctcaatttttttcgaagtagataccagcccgttccacaattcctttgaactgtccccgcatctcctcattgacaatagcgtataatcatggtcgagagcagcttctgagactgcgacagggtgtgtagagtacgacagaaaggtgttaacaatattttccatagatgctagctccatagagagcttcgaagcagccctcgcatagccatcgagccatctttctaggtactcgatctggtcggcaaagtgtagcgtggtggcacggaatgtcggcgaatcgagagcggcttcctttaatccaactgggcttcatcgagattattagtatcaccattgatgcttcaattcatagaacacaatatttgcacaactcacaccacgctgacgagcttgccgacttggggcacagggctctgttgctggttcgacatctagtgtatgtcaccggccatacacttgacgcgaggaaaggtagcgatgaggacacacaaacaatggtcccccaagtagtcaatttatcaatataaggggcattcgaaacaaataggggtatgggtcagagaggaaagtagaagtcatatagtcccggagcttggagcgagcgcctcctccgtcgactccattcggggattaaccaagtcttacgaatgatttaattggctacgtcagtgatttgtcttgcagcctggatcctcaggcacagagtgggtcttgaacactgaggcggtgagagtgggcgggttttctgccgcctactatcacttttttttttcgggcgcatagcgacttggttgaaccggtcggtttcacacgagcgttgctattgattctatcggtgttactcgacataaacatggagccaccggcgaagaagtcgcgaaagcttttcgatgatgacagctccagtgattctggagatgagtcaggcggagttcctgtcaacaatggagttaccttcaaagtcaatgaagagtatgcccgtcgatttgaacacaacaagaagagagaagaactgcagaaacgtgcgtccatacgtcccattctcccacgtatctacgaatactaacaacggaaacgtccacagtggaatcaaaattaggtaaaggttcagcttttggaaagcgcggcgacgatgaatccggcgactctgacgagtcgacctctgaagaagaggacgacgacggagaactggctactgaagcgcttgatgcagaaattatggcgacccttaaggcaattcggacgaaggatccgcgtgtgtacgaccagagcgctacattctatagtcaagccgacgacgaccagccagcaacttctgaaaagaagcagaaaaccatgacactcaaagattatcaccgagagaacctacttagtggcgccaacttagcagaggaagatatatccgaagctccaaagacctatgctcaggagcaagaggatttgaagaatgcaattgtcaaggaaatgcatgcggctgccgacaacgaggatgcatcagctgacaaggagagtgacgacgatgaagactttcttgttgccaaatcagcccccgagcccgtatcggcgccgaagaaggccgttaagttggacgttgagaatgcggacaaagatccagagactttcctgtccaactttctgtcagctagggcatggatccctgctggcagagtagacctccagcctcttgagtcggatgatgaagaggatgatgcacgggcagaggcattcgaagaagcatacaacttccgtttcgaggatcctagcaaaatcaacgcaacgttgattacacacgctcgtgatgccacgaaccagcaatcggttcgcagagatgagaagagtagcaggaagaagcacagggaggcggaacgcttgaaaaaagaagaggaaaagaaggagcgtgaaacggaaaagaaccgactgcgcaagctcaagatggaagagcttcaagagaaagtcaaccaaattaaggaagtcgcaggcctccgcgcatccgagttcactgacgaagaatgggccaagttcttggacgattcctgggatgacaaaaaatgggaacaagagatgcagaagcgatttggtgaagactattatgctggagaaggtgacggtaaaaagaagcccaagaagcccacttgggatgatgatatcgatatcaaggatcttgtaccagactttgatgatgatgacgagaaacttaacccacagcaatccgatattgagatggatgatgcagacgacgccgagggcgatgagagcgcatccaagaacaaaaagagcaaagcgcaggagaggcgggatcagaagcgtgaagctcgcaaggatcgactacgcattgaagaggcagtggatcgcaacttggatttggatattaaccttcttcccggtgcaaagaagcaccagggacatttccgctaccgcgaaacatctccaaacagtttcggtctgaccgcacgagacattctgatggctgaggatacccaactcaacgagtatgccggattgaagaaacttgcttcgttccgtgatcccgagaagaagcgtcgcgaccaaaagaaactgggtaagaaagccaggctgaggcaatggcgtaaggatacatttggcaacgaagagggtccagagtttgtgtttggtggtgagagaacggttgacgagaaagaaggtgccactgatgctggaaatgtcgatatccgggagggagaacccaaaagaaagaagagaaagaggtcgaagaagcactaatggtgtccgatagcaagcctagcgcttaattacttctagcattggagttccatctacatccgggacgtttgatatctttcattatgtggagttgtttttgtatttatcggggctaccaaaagaataaatgggtttatgagtatgccggaagtagaaggtccacacgtgagagacgcatgagatatataaacaacattagggattgacaatgcctgttgagaagttgctaatagcagcgcatctttatacatcaggttccgaaggactatatctaaacctttgtatgtatgcaatgtgtaccaagggcatttcccatgcggctgaagtcgtatcatttggctctggaccgcgggaccaccgagcgtttgccaagcggtattccgaaaggtggcaattgggtagaacgaaggattttcacgaatctagaatcgaaaaagaagtggcaagttctcttccctgatgggacaatccgattccttgggcctggggctcaaaccctacttgttctgcttaaccagtcaatgttataaccaggatatcgaatatatgattgatgccgcgagcactcataacaaaagatggacccccatgtttggtgggtctccgtttcaacgggcgattgagaagttttacgctagctttgttgccccgtcattaaaaggagaaaatgatttagagagttaaaaaaaaaaaaaaaaggaagccgtgtggatccgcatggaaccgtctgtcctctgcacctcttgacatcgtgtctttcttggactgcgaatagttatatctaatgctaagaacactggtaatgtttggcgtaaatggatcacgatagagaacaaattgaccaagcacaaggttatatctcctattgacaggtctgaaattcttttggtagaattcgcatggacacgtatgtatcaatagtacctattaatatccgaggtagtttgaggtacagcacatatgagaaaccttgggagtaaatagctgaatatgagggatttagccattatcagccctgcaagctatgggaggctgagaccaaaacatatcgaagctggaagagatggcgaataggagaaatagaatgaaatcggctagtccggagtatcattcaagatatcaaagtgctcttcagacggtgtacgaacgccatggcaaccgatagccggcgatgcacacgaccaacgttagcttcagaatttcatacagctctatggtacggagcggcaaagagattcagtgatcatcttgaatttgcctagttcattttccgtatggcgaatacaaaagtcaaagccaaggagtcgatgtcctttgccgattaaaattttgatttgccatcggaaactcgggaccaaagggaagaaagggaacttccccatgtgggtgtgggtgactgagcgtctgtttttgagcggagaggctccaattgtttgttggttcggtcacggggaaatgggaaagggagggaaaattcccaaggaagatgagaaaccttttctagacagtatcagaacgaccgattcggtatgcatccgagaaaatccaaccgcgatgatagacctccctagatgaagaatattattatagacatagcttctttttaaagagtagaacccaatagttcttgatatctatcaaaagcaattgatctatatttaattctctttcttttttttccccttctcctttcttgttttgggggcatctcacctggacaaaaccagtcggaatggtttctggagcgatcgggagatatcggctctggttgcctgggccagcattagcgtcggttccagttttttttttttttttttttctccccttcctccctggactgccggtcgctgccactgcgaaattggccagcgtatcctaaagcggtcttagcgtctccgctcgcttcttcccgcttacaagagccttcgctcgctattttttctccctttcccttccttcttctcttctttcttccatcactctcttatccatctcctctcttggttgtttagtttttattcttcacagccgccaagatgtctgctagccagagcgacaagtccgttttcggcatgcccgtaagttactattgcttccagctgtactggccaaaacttcggatcacgcggttcctggtctcgatggatcgtattgcctctatagcatcgaaagaatcatcgcagggatcaggaaattgggattctgaagatttgacgcgatggcacgcaattgatcaaggaattgatggctaacaaaaaattttcacaacagggattcgttgtcgacttcatgagtatgtgcatccagaacaccccttgatcggtcggccaaagccagatcgacaagaatcccatcaacgcagattccagatctgagcccatgattcgatatgtactaaccaatttcaatagtgggtggtgtttccgccgctgtctccaagaccgctgccgcccccatcgagcgtatcaagctcctcatccagaaccaggatgagatgcttcgcgccggtcgtctcgaccgcaagtacaacggtatcatggactgcttccgtcgtactgccgcctctgagggtgttgcctctctctggcgtggtaacactgccaacgtcatccgttacttccccacccaggctcttaactttgccttccgtgacacctacaagtccatgttcgcctacaagaaggaccgtgatggatacgccaagtggatgatgggtaaccttgcctccggtggtgtatgtctccccaaaataagcccccctatcgaataaccgctaacaaaccaatgcaggctgctggtgccacttcccttctcttcgtctactctcttgactacgcccgtacccgtcttgccaacgatgctaagtccgccaagggtggtggtgagcgtcagttcaacggtctcgttgatgtctacaagaagactcttgcttctgatggtattgctggtctctaccgtggtttcggtccctctgttcttggtattgttgtctaccgtggtctgtacttcggcatgtacgactccatcaagcctgttgtcctggttggtcctcttgagggtaacttccttgcttccttccttctcggctggactgtcaccactggtgctggtattgcttcttaccctcttgacaccgtccgtcgtcgtatgatgatgacctctggtgaggccgtcaagtacaactcttccttcgatgctttccgccagatcgtcgccaaggagggtgtcaagtctctcttcaagggtgctggtgctaacatcctccgtggtgttgccggtgctggtgtcctgtccatctacgaccaggtccagctcatcctcttcggcaagaagttcaaatagacgattgattaacttcaattcgtttcgggtgtgacgttaatggggaaaggtgtgatctgacgtaactgccaggtgctgaaaatttagagatatgcgtcaaggggttgtgtaatcttgagcatagagcagtgtgctatttccttgtaccagttgtactttactgcctgcaagtttattttatttccttttctttcaatattgcttccttgccagtctgatgcgaaatcaaatagcctgtctttttggttttcgtggttcttgtagaacatctctgaaaactctgtaaggcggtcagtggatcaagtcacatgactgatttcacgtggtattccttcatgacgtattctctcagtggctgcagataataatagctttcgagctcccttgcgacagctccttgcactagtagaacatgattgctataagaccaaaacatgctttagtatttgacatatcagactaacaacatcttctattatggctacgtctccaagcacacaggaagacaatcttcagacctcatcctccccaaccccatctctagatccaacctccaagcaagacgacctcgaacctccaaccacctcagcaacagcaacagcaccaccttactctccaatctacgccaccgccgagccagccagtatgccctcaccaccagccccagcaccaaccgaccccccaacagcacctatacacccgcccccagaaccagctactaccgcaacgacagcgacaacgactactaatacctcaccaccaccacctcaacccggtgctcgaccacaacctcctccaccagaaacccaagaaccaaaagaaccatctccatcaaaccctccacccccagaaccagccgatatcccgcgaccacaaccacaagctccgcccgcggcaagtactcaacctaaccctactaccattacttctcctcctactactaccactactacttctattactgctactacatccacatttccccctactaccgcctccagcccaaatcccagatccgggtatagctacagctactctccatcgtcgttaacacaacgacatccccacccgcacacgcaagcgcaaaccgcagccccgaactcaacatccacgccctacgcatctctctaccagccgccaacgagtacagtgaacaatacatctctctacggaaatccgtcccagttaccgctgcactatacgtctgcaaatacggaaacggggaccggtgaatcgggatttctggacaatgcgaaggcgtggttctggagcgcggggaataagttggcggaggttgaagctgaggtttggaggaggattaatgaagctcatgataagtagatttgtacggtgatttggtttgtgggcggtttggtttgtatttttgagggttctgattgggctgggtatctttttttttttttgtttttggggggggtttatgcttgtatgatggatgcttcagggcggattggaatggtgttgttgctttaatgggattggttggtaatagttgcatattttgttctattgctttagtgtattctatgctttgagattattggtggttctatcggcgtgttccaaaaatgtagtggttatcgatagcactaaattgttaaggagcaagaattatagagtggccaataatcgactacaaagcggagcaagtattgaatggacccattttcaatcgtcgagaaataatgagtatgtgaacttctattatatgacttgtcgccgttggaaggcaaactttgattagttctatatagtatttccaccaccgtagatcttgtctccggttgtgaataaagtcatcaataatttctgtgccggccaaaaaccatatggacaataatcgagatgatacaactctcggtatgttataatgcaaagcagagttgagatgactgccctatcattcgggcatatgcaatgaagagtacagggtagcaggatgtttatcggagtcgctgcggaacccacaattaaaaaatgaaaggtggaaaataaaaacgtaaaaaggaaagacagccactaaggcataatgcaataactcgcagcagtctcagctgcgaagataccaagcgaacgccagttcaattccatatcccaatgcatcatagccagcacctcgaaccagtcgagtcagctggcacatccctttcaagggtgagtcgtagaacgtaaaaagaacaaaggaaaaacatatgctagagctaaggaccggccatgaagctccataatataaaacgcaatgggcatatcgtgaaccgagtcctttgtccgagatataacattacatggatccaagacgcaaaagcgcctccactgcggcacgctcctcggtattgcctaccatgccatctggaagggagaaaccgagttgttgaatcggaggtttgcgcggcgcagacttcgccaaagaggatgatgcaggcccaccgcctcggagttgtggcgacggatggtgtccgttgacgaaaccgcccccgccgttcaaggaccgcgcacgaagcgctgcggcacctatctgtgcccagtcctcttcgtcggtgacatcttcttcgccccagtcctcatcccgaatctcatcttctggagcctcggaagatgaacaatactcttgttcattcccatcgagtgacatcttgtccgcctcatgctccgagatgtgcccagcataatccatttccgtaaatgagaagacagccgagtcgccagtcacactggacccgtaaggctgcagactgcctctcttcccaggaatctgtatcccgcgctgagagaatgagttcgagaagctcgagggtggcgacaagttctgatgctgcacatcccgtgagggttcgccgcgacgtcgtgcgtcccaacgaccccatccgactttctcaaagataacatcatttgcaggaccgccacttttctcatcacttccccggccttccaatgctgcaacgactagtcgccgtgctttagcgggagggattcgggagaatccaggcactgaagtcgtcaggtagcccatgacatggcggatggcgagaggtccgtgctgtagcatgatctctggtaggtgatacttggctagcataccgggggtgattgccccagcgctgtcaagatcaccaacaccctgatggtgctgggtctggctatctgcatcggcgtcacccaagtcgatatcggaatcaacgtgagatgtggcaaaaggaggagatgcgggatgcctcacgtcctggcccttgaaggcctgggggggaagcgttggagagatagagttagggggagtcggtaacatggtatggcctaaacgagaggagtcgcggccaccagaagtgaaagcagaacgaggtttgggaatatccacagaggctgtcttgccagcaagcgccattgcaatgctagaggtagtcgtctgagcagccatgatgatggaagaaagaagatattaattatttggttgtttgtggtggctaatctgtaatcacatgagtcagaagaacaatccaccaaccggaaggcacgacctgaagagtggcaggggtggtgactgggtacctaaagagtggttgtgcttatgtatgtacagacagaaccatggacaagcaaagaacccaaaaaattgttggaaacaaagaacgctgaaggaactttgagaatagggtaaaaaaggaggctgcgacttaccgcacactggctaaagactgaccgcagaaactgagatgcagcaacgatatgatacgtcagggcagatgcgatgcgacgcgctagttcagatagtcttctttaaaggcacgcgaccgtcgggaccgtagagctcaggaacgaggtagaatatcgacaagatgaaccgattctaatccttgactgtgctttgattcaagagaggagagaaagaggacagctttgatgaaaggagaagagagagaaggaagaggaggggggaaagtaaggagcaaagcccgtcaggactaatagtacgaataataatagcagtcgcggatggaatgtcaagtcaggcggccacaaagttgattgccggatgatcagcaggcaaagaaaaggtacggtatgagtaataccagggactccggatccttactccttttatggggagagttacggagtactaaaaggaaagtacggagtacatgcagtgcaagtacattgatttgtagggccagtgtgaccttcttatctctccttttttccttatagttcccatactatagtggtaatcatgaatacatggtcgcgtacgaacagaaaccgtctatcgcctcgcgtgggcctgttcattggctgacactcctcaggcccgcttcagacagcgccgggaccttccggagcgatccagaccttctccgggagtaccgtctcttcggtattgtattttacgcactgtaacgagcttatctctctcttttctattcccagccattgtccacgcacagatacacgcacacacaaatgatgaaataatccaactgaaggatttaatttcaattaatcaggtacacttcatgtacccagtacatatcagacatgttccatatactccaaatacgattaatccaccgatgtcatgataataactcatactccatcccccgctccacttccaagatttaccgtcaaacaaaaaaaaaataacacattctaagcacgatgatgtcgtagtgtacaagcttctatacaggatttccagtgtccttggaacgccgaagatgttccacacaattctacccctcgggtaccggatcgacgagcatatcaagatgcatgcctcgtgctcgtgcgcgaagtttggttgcatgaggaaagcaaagcggaaaccctattctattcgcggtacgcgataactttccctgattgtcacacgtgggcgttcaacacctcctcatatctgaatgcgttgaatggttcccctcccccctctctgcaatgagaagatcgtggggtgtgcatgcaacgaatgtgatcctggtgtctactctgatttgctccgttgaccagctgagaagtaaaaaattcctgccggttgcatgatgctagaaaccttgtctctccagatactacaacctaaagaggtgggagtcttttttaaatctcatctatgattaatatacttcatggatgtatggtttgttcaccggtaatgtaagagtatgggtgtatcgcgtttatcattctagttacaatctgccagtgcccggatgcaatttccaggatctactgcgccgtagaagtggggtctgaagtccgaacatctcagcttctgtcgtcagcccttgtctccgtgagggtatgatagccgacaacctccgcggcaatgggtacttcccctcatggctcgaggggcttgagggatttagatgctattcactcatttagctctgtttaatcatgtatctgtgctcggtagaccagtgcgtatttagaataaaacgtcagcgaatttgtaaatcatggaagtgtgggggtggggtgttggtggggggagaagtgtctgtactttagggctaacttcctattccctgattagttaacaatcaggcacagtggctagaccattgtaccctgcagccatttctacgcccaggggtaaatgttttctacagtgtgatcatctagatcgaaaatccctctaggtatcatgactcgattattgttgaacaaggtggtaaaccctcggagatcggaaccggaagaaggtcatagatagaacatagggcagcaaaattagccatgaaatgtatggagcaccctgggcgccaagtggatttacgcaaccggtttggatcaaaatccagtttgcgttgttctctttgtgtccgagacatttccgtttcatcggagggagtcagagactctcggcggacggcgtaatattgaacccctccatgaccttagtcaattgttgaagaccggtggcttcaagtgcttagtgatttactcgttatgatgtccactatttttagcttctcaggagtaccaactaaggaggtaataacgggttggaagcccattgaacagtatgtgatacatgtagagaggtcgatatgataccagttttagaaatctacgtggattgaggacaacgagcgtaaacattctttgtacttctgtttgatgtttctctacgcaatgtaagcattgaatatcagcctttatcttggtggcgtaaggctgactactatcgctttgcaaatatctccagcggtgtcacaatcttctttcagtaagagcatgctgtacgcgcatatacgcccagagtatggcttacatcactggcacattatgtattctgtatcccttcttcacaatggcatgaatggaacataaagaggcatttcaaaaagaagaggatatcttatctgaaggcatctggttgtataatacccattcttgacttatgcatttagttgtaaagatcggctaatggtggtctccacgcataattaagacgatgtataagaaagtaagtgttctcctgagagttgagattgtgctttctgttcaatgtcttaagctctgtggtattgctgcgatacaccccttgcactgtttcgttacagatatatatctacggcagaccagaagtccggagtttaatgcattcctgtctgtgattttttgtcccttgcagatatcgcacagcttccgatgagacacattcttgaatccttcaagccaaggttttgagtcactaataaccttcgttaacttatcactggtggatagaatcacagcctcttgtttgcacacagtgattgtcaagtatgcaggcatacagtgatttatgcctgaatgcctgatgcttacatcatcacaatatcggcatccgatcttatcgcttcacatccgaaaggaaatgctccagacccgccgcatctgtcggataacaaccttttttgcggggttggtcttgatttacacaatgtccttcaagtccttcttaatattatttgccgtcagttggcaaagaggcccactgcatctcctgcaggtgccgatccgccacacatacagacatcggacgctctctcggagttgacccggagaacatcacaaccgttgaagtacccttctatcttccgaaaaaaatatagagctcagtcatatataaccttctccacacctcctgtcgtgggccggtcataaattcttggaaataaagttctgtttatatccatccttatcccctgtagatatccctttgcgaacgcctccacgtgaaccatcagcaaatcagacatggggagtgtgtattcacctgtccgtgagacgggacgtatcttttcctacctctgtgaccaagccgagcgtctcaatctcccttcagaggtagtagaaaacaagaatgcggtattgttcgactcttctcacgacgaggtctactatcccattcctttcaaggagacagaaactttggctgccttgaaaggtgttgaaggatctgtggcagctgcaattgcgaacttgcgctatggaccacagaagcgcggtgtgaaggttaaccttgagcgagctacagcttttggttgccaggcatatatggcaaaagttgacggactgtctaagctggacccggaggtcaaaaagaagttgaaaggtgggaagctctatctccgtgtagaagtgctagctgaccagcccagacaccgatttgcttgcggcgcagtcgaatggttaccgccggatgtctgcaaacctatacaaaactaagaatgagggcgaattcttccatattcatggttccctcgaggccacgacgacgctgaatatgattggattggatggtcaccgtccagatctgacagactacgaagagattatcaaggtcattgagagccatgtgcagaattacacagctgcagagttggaagagatgaataaggagagaaagcaagctggtgtgacggcatttaaatacgaagactttatcaaaaccccgcatgtatgtggcattgtctgctattcataccgtcattcatgcaataatgagactgaccgcgtgcctgcttagggtgaacttaatgtccaacaacccccatggaaggtgtcccgcctcaagggtgacctgcctcccacaccctttcccgccggccgcgctgggagtaagaagattcttgaaggagtcaaagtcctagagctttgccgcatcattgccggccccactgttgcacgcatcctgactgagtacggagcagatgttttgaagatcaccagtccgagcctctctgatgtgccatttttccaagtggatggtaatatgggcaagcacgctgctgacttagacctgaaatcggaagaaggacggcgccagtttgaagagcttttggctgacgcagacgtggtcgtggacggttatcgcccaggggccattgagaaattgggctatggccctgaagctctttcctcactggcagagaaacgtggaaagggaatcgtgtacgtgaacgagaactgcttcgggtatgagggagaatgggctggccgcgcaggctggcaacagattgcggactgcgtaagtagactcaaaaccgtacataaacgtggaaatgcttacataaactacaggtgaccggtgttgcctgggcacagggacaattcatgggattctcgaaccctgtggttcctcccttccctatttcagactatggcactggttgcatgggtgccattgcagcattgactggactctatcatagagcgaaaactggcggctcctaccatggaaaagcgtctctgatgcactacgatctactgctcttcgctgtaggaaaatactccgaggaggtgcaggaaaaaatgcgagctgctcagcccccagaattcttcaagctgagacactgtgacagcgtggaccgtatctcatcgaccgttctgaagattatgcaggcccggttccctcatctctacgtcgccgccgataatacctcggggcaagaaccgctcacagagaaatggtactctaaggcctacggcgcggatattgaagttgtccgaccaatctgtgaaatcgatggtgtcgagaataagttcgagagggcttcccgacctaacggaacagatcgggcaagctgggaggatttcaaagaggtcgaagaagatcacaagaaggcttaatcattccagactgtatatacaactgtataaatcatgaatactacaacaccatcactatgctccctcatctccaagaagaagttcagatagaccaatcacaaaagtatttaccctcgagccacacctacaaatcctaaaccgcaaacccagcagcacaattcccgacccagaaaaaggaaaagaaaatctccatcggatatcgatcggaaagccctcaaaccatcggcccgaaacatcctcccagcaaaactgacatcaccaaataattgaagcatacagtatatacctacccctcgtcgcgcaataaaaacgatctaccgagtagataaaaccccccattcccaataacatcacacccccaataaccacccaataaacctaccaaacacgagaagagcagaacgaacacagccaacaaaaaatgtcctacaacctcacctccaaccaagccctcgccccacccaacggtgactccatgatagcattcatggaatcgttctacgcaaccagtgacaccgaatccctgcacgagaaatacgtccagagtttcacccccgatgcaacgctaatcatggggtcgaaggtcgcgaatggagagaaaggttagtctcgccttcctttttccacacttactcttttcgtttctttttggttttgatcccgagatgtccttgtctatggtaatcagggaataaatggtaggggtgtagttctcatgagtgcgttgagctgacatgtatttccgtggaaaaaaagaaatccttaacctccgacatggcctctggacgcatgtgaagtcgaggcagcatttcccgacgaaggtttattttgggggtgaacgggagttgatgctctatggaacggttaggtatgtgcttaaggcggatccggagaatgaggttgaggtgccgtgggctggacgggtagtttttgatgagaaggagttgaagatgcggttttatcaggtttatttggtgagttcttatttattgttgttgttatggtcttgaattttagggttggagactgacatctgggggactgtaggatcctacggcgcagtcggggaagaaatgaatgtgtagatatagataggaggcttgattgatacaattgtacatacattctacggttaggtttcaacttacactcccgtatgcaaggcttgaatctgtgaagttgatatcatacgtgctctatttttcaggcctggggagaaacaggagatgccgtcgggggtcggatcagggcgaggcgatatgtcttatcgacataggaaggagagagagatggatgtctttgggtagtcaaggttggtgaattctccgtagtaggcccccgagtcatcaggaaattgaacattgtaatatgcaacaataaagaaacttcattcctctccctgagtccatagccatcaatcccactcgatccatgccgacgaagcgtactcgaccgtttttcacctgatttttcttccggaagtttaagatccagagggaaaaatgaaggaaaaaagaggcaacgtggaacacatcaggactttttcattattttaatccgaggctaatttactcgtcgtcctcctcttcctcgtcaacggtggtcttggcgatacggtcaagatcacgctggccggactgggtaatgcgacggccacccttctcctcgtcgtgctcgaggacaccgatcttctcaagggactggatgaccttgcggtcgacggagccggaggcatcgacgtggtggttggggcgggagccacggttcttgacggagccgtggaccttgcggaggcggccaacaccaacggtcttgcggaggtagatgtgacgagcgacggcagcggcacggacgtagtacctagtaattgtcagatgtgtcggcagcgcaagaacgacattgttggttcagtcgtaccagtcagcgttctggggagggagctcgttggagcaagaggtcttgacagtgtcaacccatcctgcacaaattatcagtttccgatcgatcatgagacaagttcagtagaggttacgcaccagggatggggagctttccctgacgcttcaagaacgcagagtaagcagagatgaacttctgcgcctgtaattcaaaattagtcagtatacgtcctttgcttgacccgagcttgcaatttttgctcctgaagatcctctggcaaatttccggtatctgataatcgcaattcgttgcgtccatcgcggtgttgtatatcctatgcattccagtcgcagatcccatcaatcgatgcttcgcgatccgatcgaggatatcgatgtcgtccacgtaaaccagtgcccataatgatccagcacgtccagaacatcccaagatttctgcccctcactccctgccatgcaatgttggtcccttgtccttttccccctcttccagataccggtgccatatcgacttcaggaacatataggtataggtgcaggggggacaggacaacttacgtccacatcgcgaacggtgacaccacccatttttgcgactttgaacctcgagcgggaatcgaaggtgtactgaagaggggacgaggtgagaggatgggtcgttgtcgtcgttggagagtcggtcggtcagatcaaacctcgaaatttcggacggacaatcacgcggtttctcgttgtgggtttgtgggtgactaatctccgttggtccgtatgtggactagcgtaaccctaaacctttctgcctcaggtatcacagttgagatacagatgacggctccgaacggccttaaacgggaatggttaaacttagtacccgactagccggggagctggttagacttgaactactagccttttagtttgatcgtgcaggaaaagatgggggaagctagcgttgcttccaagtgcaccatttaatacgtagtattaaggacataatcgtggtagacaaaaattagaattgttatttatcactggctactgtacagtctatcaaaaaggcactcattgtcataactcatcattacaccatcccaggccgtgatcccaagccgaacgccacatagtcccgaaaatgaaaagaaaagagaataataataaaaggcaagaagacagacaagagcaaagacaaccagcagaaggacgagaaccccatctgtcttctacagcgtcggtgctctcttaagcccaacacaatatcgcacgaacaatgtatcaataaaatgtccatgacggatgcctggtggacggcgtctttcaaattcgtcaattgcttcctggacggtgtacccacaacgttcaatcagataacagacaatcaagaaaccggttcgattgtatccgtaatgacagtgaaccccaactaccgggcgtggagtctggcggttgccagacttcgctatcttctctgtaatctcattctgaagcctatcgaccaaggcaataaagtctcgtgtctcatctggcgttggtggaatcttcgacacggtaggatgtttgtggtaatggatgccccccatttccagtgaggctgggttgtacaccgggttttcgtagctaatatcgatcactgcgtagatccggtcactatacgcttgtgagaatagtacaggattatgctcctcgtccacctcgcgcaacattttcagcgcgacgaatgtgtcagagatgcgctctgaaacaggagtgactttcttccacttcgccaggttcttcacatcccacttgcccgatgtattaagatattgcaactgccatccgagactcagccggttatcaacgtgctgctgaaggaagtcttgtatgattccagctagagtgcgatatgtcgcacgatcgtaaagaagagcgtgggaggctggagctggcaggatcaccgttttgacagagcgtttagcttgaagtggcttttctgaagtgttctctatctccttttcattcacttgaggctcaacaccaaactcttcatcgtgtgctaatcggctgtagggggctggagcctggtcattgactttggaagcatccggaacaatgttgctaccgttgctgctttcttcgatctttgagcttttgcccccgaagaatttgagaattctctgcaattccgcaggcttcgttactgtgtcagattcgccagccacaagcaaggttggcgtccgtactcctgcccaggtcgtctcccctggaatccctcctacaggggttccatcgacaccgtcatatgtgggaagagtaccccaagccatgcgtctccacacaggcgtcttgctttgtttgttgtaccgtacttgaagtcctcttgtatcgggatcagcatctgcgccgacgagacgattgacactggtgctcttcagaccgcctcgtcgatcccagtatcgccaaaggtcaaagatcggacccggaatgtggaggaggcggcggaaagacgtaacttctttgggagatgggggcgacgcgcggggacaaacagcgataagtccgagaatatgctttttcaagttgggtccagctggagaggtcgtggatgccaacattgctgaaagggaacagcccaaactgtgagcaatcaagactaccccttggccggcgtctttgtcacgatgcccttcaatagcagtcgcaagcagttctgcgagcgcttcgaccttatatgcgtcccaagaatcaggctcaaacctcgacaatccgcaaccgggcagatcgattccgaagcacggtccgacgttagacaagctcgtcagcagatgattgaattgggctagcgacccacccaagccgtgtacaaagactagcaacgggattggcgatggttttatcggcagcttgtccttctgtggatgcggcttgtaaaatgttcttatggacggatatgtcgcgacagatgtagtgtaggagatataagttgaatgtttcttgagtaggcccggatctgtggtttgcgctatttgaaagtcagcaataagttgatagcagggtagggctaggggcgcgcagaccatcatctggcagctcacggcgttgaggctccgtcttctctgtagagaaggcgctgtctgtgccatgtcgcaacgatccactgctgtcatagccttcgtcttcggacgaggtaaaggttccagcggacgttttagaggattttcgacgagcaccccggcgacaacgcttgttccccgaagtccgcccagagcacttgcgccgtagaatcagggataagaacccacatccagccatgacgataaagcagatactcagcaataaggcttttggtgaactcagagatccatcacgatcgaggctttgggaaaggcgagtgaaagaaagcaaggcagttgggttggtgaaaacagagtagatagagtcccagaagcgtatgacagcactaatatccgaaacgcctagacgggaagtcgtagggagtgttggcgaatcagtcagccccattgcgacaagtctttaacttataacgatgccgatccggaccagtttgaacagctccccctttccggacgacgtattcattcattcagcgtttaccacgccacaatgtttagcgccaaacagctcacccggccgatccttgtgggattatgggggattcgttctggaatgcaattcgaatctacacgagatggaacggcggaacctctttggtgggtagatctgggtttagcgcaaaagtgaggcaaataagcgggtcaatcgaagcaattcacagtctcagatggtgagacgaatccaaattacggtttgaatctctcagaaggcctctttgaggtaagggagaggccgcgacccgacgttcttagtttgtatctagagtgcgcccgccgagagtaatcggaccaataggtgacaagcatgcagcacgttggtcttcagtctatctttgggcgctccggggaaattttggagatccacagtttgaggcaaagccaagaaaggagcgactattgattctctgataagctcccaatgacgagttgactctatcccaggaggcggacaagacagtaggcccagatacaggccacacggattaatggtatgttccaggagacgaggggaaacgtgggatatatgctacggccattggaagaatggtcagctagaaccaaggttacttgcaaagaattcgcaccgacagtacgagcgggtgcttggtactttgtgtgcaacaaacaaacatagtgtcttacctgaggggatcaatgcgaaaagggtccggccctgtgagatgtcgcttctccctggtcacttgtcaatggtcaaaataggaatgcgactccttgctgaggaagtgtcgatgtttagctctggttctcgtggagcttgtttgttggagcgaaaaatacattgtcggcctgtcagaggctcggaagcagcaccgtggaggatcggcggggatgagtcatccgcctttgcccactcatggcgtcagcctgcatctcgtggctgcactgactcagcaggaacgtcatccatcatggaacattggaatgcctgaggtgcagtctatagtcctctctccctaaaataggactcaatcctctggagataatataaagagatcgagttggtcatcttacaactcttctgtttatagcgacgaccgattggcacatatcacgtttgattttctattttcgccattcggttctgtatataggatgccctggaacaggcgtttcccatcagctcctattggaggttgtactgtgtatatccctgtggtacatgatacatacatgcagacaagtatttgggggcatgggtctatgaagagttaggaccaggagttacgtttcatgtcagccatattcagcacgcagtttggctctggcatctcagtcataactcgatcgcctaatgttagtatgatacccctgctcatgcatggacccgtttgacacataattattgatcatgatggcatggtcagctcgtaaagcaatcgtatggagtttttattcataattattaccatgtacctaagatttcctagaaaaggtccgtcattgcgccgtgggaagcgtcaccaaccagccgagcatacttggccagcacaccgcgtgtaacgtgcggtgcgggaggttgccactctctcagccgttgctggatttcttcatccgagacatccatgctaatttcgttggtttccgcattaattgtgaccacgtccccatcgcggacaacagcgattggtcctcctaccgcggcttcgggtacgatatggccgacgatgaacccatgacttgcccctgagtatcttccatcagtgatcagtgccacgttggtaagcttggctcccatcaatgccgcgctggccttgagctgttccggcattcccggtccgcccttggggccctcataacggacgatgatcactaaattctcatctcggggtattttaccctggttgagtgcatcattgagttgatactccttatcaaacactcgtgcctttcctataaatttagtgccctccttgccggtgatcttggccacagcgcctccgggggctaggtttccacggaggatctgaaggtggccagtcgccttaatagggttgtccaaaggacgaataataacctgatcgtccggtaacgatgggaatgatgccacgttctcggccagagtctttccggtaactgttggaatatcgccatcaagcaggccccctgcaatcaacagcttttggacagacggtaccccgccaatatcgtacaagtccgccatgtagtattttccactgggggaaaggtcagcaatgaatgggatcttgttactgaccctttgaatatcatctaaagtaagttccacgccagctgtccgagccatggcaaggaagtggagcacaccgttggtgcttcctccaagagccatcgtcatgacgagggcattttcgaatgaccgcttagtcaaaagatcacgcggtcttatattcttctccatgcaaactttaatcgcttccgccaccttgacacactctcgcatttttgatggagatgtagcgggggtggaagaggagccaggcaaagacagacccatcgactcgatagctgtggccattgtgttcgcagtgaacatgcctccacatgcgcccgcgctgggacaggcatgtctttcaagatcatccatgatctcatccttggtcttgctggtgtctccaccgtcgtccggttgacgcaaagtatcatatgagtaagccccagcggcttcgaagcaactcgaaacgttaattggctttcgtaggaggttggaatacccaatctgaatagtcccgccgtagatcatgatggagggccggttatgcctggccatacccatcaccactccaggcatgttcttgtcgcatccggggatggcaatgcaggcatcgtggtactgagcacaagtcacagtctcgacactatctgcaatgatctcacgcgtttggagagaaaaccgcatgcctgttgtagcgtcaggtaagtcttcgatggaccttgtacgtagtctgccaagtcactgaccttcactgcccatggtgatggcatctgaaacaccaatggtgttatattgccaaccaatcatgccctggccctcgacggccttctttaccgtcttgcccatatccagcaggtgcatgttacacggatttccttcccaccacacagatgcaactcctacctgaggactctttgccatagcgttttggtcgggaacacctgctgcatagagcattgcctattagagatggaaggtgctgtcagtacgatcagggtcaaaaactccagtcgacggaattgcaaggtaaactacttaccttagcgccagggaagtcatggcctctagtgatggttgcagagtagcgattcagtgcaggtgttccatcctcatgcttcgtcccctctggaagacaggggaattcgatgtatttcgcttccccaaaggttgcggagacggcggggttggagggatccatggcgaacgctgaacagttccaatggagttgccgttggatacttcaagacagccaaatgaccctatatcttaggtcgacagtagagaggggcaatatagctttattaaggataaagacgatagagcgatgtgcggtggaagtgagcccctcatctcccggttaatcggagttggtacgtgtctccgtaaaagagcatcggcaacatgtccgttgcgggggatgttgaataatcggaattgatcctattagttgttgtttctggggagtataattcaattgtaggttgtgatttgacgaaagtctcgggtataaagtggggaacttccaattaccggtgacgaagctgggatggatacattttttgtgtatatggattactgaataggtagtagtagattctcaactcggcaaaagcacctcaaattcaagaccagtgagaatcgtacatattttgcagacacgaaccaagaaaccacagtctaagggattcgtatatgtcgtttgaacttaaggaagttaagatactagtagtgcttttagtaagttctagatagataaccaagaaaagatgagggccagtgcaactgggtatctttgaaaaaagctgactcctagtaataataataatttatcgtataatatgcatgagaatgagatgattgatgcctttcgctttctgctgagcatgttattcagccacactaatctgattctcggccaatcgtagaccactggccagagtgttgtagctcttcatctgagatagagtcctgcagtgggcccgatttctcaacggaaccatccacccctttctcaggctcatcacgaggggcaccagaatcatcgtctacagcaaagccaacaattttccctgagcttgactgaggtcgagcctcctcaaggacatcaccgtgccagggtttgcatttcttaacaatctcaccgcagcgtagacaaatccaaccttctccttcctctccctcgaccttttgcactaaacagacgaagcagtatacgcagccacatgggattgcctcataaggatttgtaatgtccgtctgcgcggacccgaggatacccccagaggccgccgatgcagcgatcacttcgctttctgttgcggactctggattactcgctttgtaacatattgcgcaggtcctttcgggaaggaatgctaactctccttgcttctcagcttcttcggagtctccatcacttgatctaatactagacattgttctccgccacgctcgggatatccatcgtcgccatctgctgattcccacgagaggcagcaggaacaaaaggaactccgtgaatgcgtgccacacaagttgtcgattcaaatattcaaacgacacctcgcggcttgcctgtgcggagggaggagtgaggcgtatgcgaaggatacggtcgactaatgttcggtatcgaccgttaactaagaatacaaggaaagagatgaaagctgcgatcgagtgtgtcgtggaaatgagatctgtcatacgagccagtatccgcacttctcgggacggctgccaatatgagcataattaataactgaagggtcgccatcagcactcacctcgtcatagccgccttcttggttgatcaaccagctctcccatttctcccaggcgtagcgaccaccaactgtgagtagaccatacaaggacttctgccactttgttggggctgagtgaatcgggcccttgctgcgagtgtctacgtatttcaaattttgtaaggccgctccataagatgcgttgtggtcccaaatcgagagcttgaataagattgcacgtagagcaaattggatttcgtgggaccagtcctcacgggcttggggctacaatatcagagcattagtggacatcatacaatacaatgttggaaacagatgagaactacctaccccgaaatacttcaaagcattcccgacttgccctttcagtaaccctaacagttcctcatccaagagttcagcatcgacctgtccaacacggaaagcaggcctattgccctcgcgaccttttatcgtattccagaatgagagacctgagacaggtaatctattcaaaggataagggagtctctggaacgcaggatggttaaccggcgacgtccgctgctgttccgcaaatctagcgcgagcttcggcttcgcggagacgacgacgttccagaacgcgctcctgagcagcggcaaaatttgtcgagctcattgtataatcatgatgttttatcgagataaatcgtttcgtaaacgagggagtcaacaacttgagcgggaaacggccagcggtgttgcggaggccaatgcggtcggtcggttccccagattggactttgatctaatctgccgaggtcgaatcgaaccacgtgatcgtccgtggtcgtgatggtgaattacatcgaccgccattctgtattcagctggaggttgattcgatatgactagctctgtctttcttaagaatgaggaagaagaaaagacaaaacatattgacttgagaacacaggacgtagatggccgtgtatggtaaatcgcataagcaatcaatgcctgttcgactggaacttcagatctatttcgttcgtttaaaaacccatggaattcctttccacgaatctctcatagttgggccgagggcaatggatcctttcattgcggcgtgcactccaatgtgagttcggtttcgcagataactataaggagtagttaaacccgcactaaatcctggatccatacagagctatgacccgtttatccgcaatcaaaatagttacgggaaggacatcaccataatactggggaatttgactaggatttatcctttctagtcgatcaaggcaattaaatatgtcttcaggtttcactgaatgatggatcatcataagaacacctagaatcccacgacacccatacggcgcctgagcatttctcttcactctaaagagcaaagaccaatatataagaatccaatcaggttttggtatacgcacaagttagtagtgtagtggcggtattacattgtgtgttcaattgcctcgcatgtcttcttggagaaggcttttgtccacttgctacttaagctactcatattagcagagtaactaatgagcttgtgtagttgtatgggattgagaaagagaaagaaatccaacaacatcatggtaatagttagcatttcaaggctttgatgtactgatcaaacatatcggcagtggctgtcagccacaaaatgatttactcttccggttgtatagattaattccatccactaagagctacccatattggcgcgtttcattcttgggatggttgagtgaatgacgggaaagatattagaatagcctagagttggtcatgcgatagtttgcaaattgaaaccacaatggtattaaatgaaagtacggagtacaaagctcgtacttgccgaccgagccgggccagtcagccctggaaggtattaggtgcagtggtaggttacttactcctagtagcttcctgtcttatcctatgcttcactaataactccactcccaatggacaaagggtagtactggagttgtcaaccagaagatggcgcacgtgctgccctccaaacctccaaactttcggccccaccgagggcgtggataagcattcgcccagacctgatcccgggacccactatgaaccaggatctcgaagttctcgcatggacgacttcctgtactgcaaggggccctgccttccttcgttcaatctcatccccgctacccaatctcagactagtctttacaaaacaatgccactaagcgattcagctgttgcctgcggttcaattagccgaaatgacaaccgtcgaatgaaacaagcttccctgacctcgtggttctaaacgttcaattatctaactgccttggtggatacaacccgccagtagcgcaatattctactgagtacactgcaatctgccctaccgacctcgtgtgcatagtacatggtcctatgcgatagaattttcctcgctgtttcctataaagacaggtgatcgcgctccctttgctgatcattctttgcattcttcctcttgcatcggtgacaaggacgatctcttgacaaaaagagaccacatagatctcaaagatgaagtccttcattgcaagcttattcgcggcctctctggcctatgcccaaacggccacggagagtgaaccttccctgtcggacattgaaaaggctgcggctaccactgagccctactctcctgtgtccaatgtgactggcctggcctttgacagattcttccaagtttggctggagaacattgtatgtggcgcaccccgaatcttatcttccctacattctaacgcatatctttcaaaggactattcggatgcgtctgccgatgagaactaccaatggctggccaagcaaggaatcactctgtaagatttgatttttgagactcgcccaactgtcacaattccttactgactttcctagcaccaatttctttgcaactacccatccctccgagcccaactactgcgcttccgccggaggagacacttttggcatggacaatgataatttcaaccaaatcccggccaacgtttcgaccatcgccgacttgttcgacacgaagcatatttcctggggagagtaccaggaacatttaccttaccctggattccagggatacaactactccaaccaggaaacttatgccaatgattacgtgcgaaagcacaacccgttggtgctgtttgattcggtcacgaagaacagcacgcgtttgcgtcagatcaaaaacttcaccaacttcgaggacgatctcactgataagaagctccctcagtacgctttcattacccccaacatgaccaacgatgcccacgataccaacatcactttcgccgctaagtgggaacgtagctgggtctcccagttgcttgacaactcctatttcatggacagcactcttcttcttctcactttcgacgaagacaagacctaccccaagggaaacaagatcatgagcattctcttgggtggtgctattcctgacgacctgaagggcaccacggatgatacgttctatactcactattcgatcatcgcttccatgtcggccaactggggtctgccatctctcggtcgatgggattgtggtgccaatatccttgagattgtggccaacaagactggctatgtcaactatgatgtcgacactaccaaccttcgtctcaacgagacataccccggacccatgtccgctggcgagtactccaaatactcgcctgtgtggcccaaccccttgactagcggcaactgttcagctggtcatggaattctggacattgtcaaggagacctataagggaaccactgcgacttacaactacacgagccccttcccctatgactcaaagagcggttacaatgtcaaggtcaccgcgactaagaagagcgctagcaacaatggatcttcttcctcatcgacccctaccccaaatgttgctgttcccttcggtacgcccgctgttggaactatttccggtgtgttgatgggccttctgttttgtctttattaaggcaatattatgcgatatgtctccttatatgtacttattttgactatgccagcaggccgtgcttgaatgttttatatcacgagtagcagatttataatgattacacaaatgatgctgtgagcataaaagaattagcatagtaacactaccaactgtggaaaattgttgacttctgtagtgaagcctattcatcggtctttttggttaagcacatccattcttagtagctgtcaaatgttcttcgggacgggggtagagtagaacagcttttcactccattctccctgttttccggacttccttcgcagaatttggttgagaattgtgattaaggccaggtttcagattgtattcagaaatgtaaagcttgctattcactgttcgtaaaaaatattcgagtatatgtgagcgcatcaagaacttgtactgattaaaacagtctttgtctccaggtagctgtccaagccgctcaacaaaccctcccgacccaagccgctctgcttgtagccacccattggcatgtccttcacaatagtgggactcgtgcagttaacaccgaccgtacctgcctcgagaagctttgacagccgcactgcacgatccatatccttcgtgaaaacagaggcgtaaagaccaaactcggaggcattagcccgttcaatcgcctcctcctctgtcttgaacgtattgatcgccacaacaggtccaaacacctcctctttcataagccgagagtcatcagggacgttttcaaagacggtcggcttgatgaagcccattccgccatcccctcccatcgtgagctttccgtccttttctccgatttctaggtacgacttgacccgctcatactgaatgttgtctgcctgcggtccgtggttcgtcgtcggctcgaggggattgcccatgcgcgccgcggcgccgaacttttccttgaatactgctatgaatttatccgcaacggactcctgcacataaatgcgggagttcgcgaagcaggtttgtccgctcgtgaagtggatgctgaattgagtcttttctgctgctttttcgatatccgcatcttcgaagatgattgctggtgttttgccgcctagttccaagtggactactttcaagttagacttggctgctgcgatttggattttttgaccggtggctgtggaaccagtgaagctcaggcagcgcacatccatatgggatgctatggcactaccggctggacttccgaaaccggagatgatgttgacgacgccaggtgggaagccagcctctgcaattaattttgccgcgaaagcagactgttacagaaaaaaacgtcagatggaatacttcaaggagtgatggctggctgaaacttacagtcaaaggcgccttttcgctactcttaagcaccacagtgtttccagcggccaaagcaggggcaaccttaatggagagaagcgcgagtggcatattccaagggatgatagcgccaacgacgccatacggctgcctaagcgaaagaccaagaacgctaggggtattcacgctgctagttccctgcgcatgccagccagcctctgcataataagcaaaggtgtctgcagccagtttgccatctatataaagcgatacaggcttgcccattgcgatagactccaagcgagccaactcgggtatattctccctaattaaagctgacagcttgcgcaagtagacacccctatcatctggggtgaggtctctccaagctgggaaagcggctttggctgctgccacagctttgtctacatcttgctcacttgcctcatggactaagagagagttagcatctgctatggataggtacactttgtagaattggtggcgggtgcagcaacggaccgtctgtaactggttcatgtgtatatgggttgatcaacttgaatgttttcccatccgtcgatggttgaaactacgaagacggatgaaggcttggtgagcatgaagccttatgatcatgatattacgactatgcttacctcgccattgatgaagagccgagtctcaattggctgctgatcagcggtagtagacgacatggtgggtgtgatatggatgcgattttgggtgaaagaaacgagctacagtagaggggaaagagagctctttatatattctgttagccctgtacaaaactgtcttccaaatcctgggcgtaagatccgaccatacgaatcgacgcattggatcatgaacgagtgacatgataaatcgacgtatttttatcatggggggatatcagggatcagtggtcaataaaggcacagaagcggggcagtgcaatccgccgagactcgagaagacattcaatcctagcgcttccatgacagctgtgtggagcctctcgtaaacaggtccataaactaagctcctgatagcattgtattggacgctgggagccgatacggccaatgaatattagagaatgatgtccatagcaactgaccgggatccagccgcccatcacacggttgcacttacgcaggagcctatcggagcattgcccatgcgggaacttagtccactaccactagtcataagtatagtgaaccgttgttctttggcctacatagtcctgtccgatgcctaatacacgtgtcgccgcttttgtgagggcaacatagctctttggggcactcactaattcttatctgagcacacacctactagacggagatacacttcagtttctcgagtgtctagcttgtaataagccttgggtccggacaaattgacatatcgcatatcaagtattcagtatatatctctttgaaaaatggcgagagaaccagatatatggccaagcgaagatatatggatataaataatgatcatgctttgaggaaactccaactcaagtccttctctgctcagcaaccccatgcccacggtcctagttgacgggtacatgcgctctccaatcgcctttctacgattcagttcttccactaatctcagatgcatctgcagatcttctcgagcggcatcacctctaggagccgggaaattctccggtaattccatctggcaacgctcgtgaagcgcttgccacttgatcgtcgctccaagcttgcgagtaaaaatagtgggatagggcctctttaatcgcctcaatatgagcaaagtaagaagaacactgtgtaccagtccatccttggtagtataagaagtcatatagtctcttctcggcagtagttagttgcgaaggattcatggcgtgaggctcgtcaagcatcgatatctcgttggaagtaaaggaaggagcttggctcggtcttgagaagctagtagtcgacaaagggagtctctccatctggttcaacagacagattcttgccctgtgtgggtctatgaccgataaaagacattgtctctttgtgattccagggatttagactgaattggggtccaagtaaagtaaactggcgaaatcaacgagtgataatcaaaaggcaccgaaggaaagacgcactactgagaagcgagttgctggttaccttggccctatttatttatcaatcaaaataaccttgcacatatactctgtactggcagcaacattgcttacagtaatttactagcactataatttgtatcaatataaccactatctttcgcaagcttacacttagaggactttaccgtataacactatttccatgctcttaacataccattcttccagccggaatctaggagcaaaagctcatatcacttcaaaatgagttatatgcgtgcactatgatccatgatatccaagtatttacctcattgatgattaagttcttagacccgccgcagcttttgacctctacaggaataagctaaaaataggacttaagggctgtcagtctatgacatatcactctaaactagtgggggagtagtcatcttgatgggcagctggctcaatgctcatggagtgcttagcacacgcactttcgccttgccccacgctccgggatcaatcactgagcaaaaagcagccctgatctaatctgattccggaaaagaaaagtcccagtttttttttggcaaaagcactgttcgaaggtaatagtatgactaggagggatgacggtgttgttttcttgggtatagtgctgagtggggtccaaaattgaccctcagggtagtatgtgcctagactcctttagaaggtgatatcattggatggcatgggtggtaatgtattctttactttcgtttcactcataaataccaatgcctattccattctcaattgcgtggttctgttcttacgtttaggctcttcaagacccttcttttgattactgtagatgatcgctgattagcgcatccttagcgctgggtctagattaaccacatcatattatttcataacctaaatatatgctaactattgtaccctggttctcaaaggctttccgtcaaagttctttaccgagaaagtcctttagtcttcagatcctggatgttaagtgtgtcttgatcacccggacggcgttctgactcgagctttaccttatcctcagggcctccggtgccttcatattcgctagctggtgccaatctggttatacttagcatcggatcaaaccacgtagaagtatagataaaacaccaaccttccacgagagtcccgagtgcctccctcgtcttcagggatgggtttccggttgctccctgttgcgcctgcctctcggccagttttgattcccgttgcttcacggaatttcttgtccgccctttcgtcgatgttggactcgaggacttcatactttcttagcactatgtctcaagactcattaataacaaggctcttcgtaccagagtcgctctttggtccaagaccttgcttcatctgataggagttaaggtcttgctcagcgcgagctgccatacgaagcttgtcggagtcggccattgtatcttgtgtgaagattttctgtgaatgtaaccgaaaggttcaaaggtataatactattcaaataagatagcgctttgattgtttaaggaagatatcgcatgcgctcagcaacaaaggcgccgttcccagctatatacccatgatcgaaatctgttcatcaggaagtagagacattgcatcagaatacatcatatctatgtaaccagaaacgctgaatacattgcacacttgctactgtatagagtaactggtccacttaatcctgcttataaagatggatctcaattgtagtgatgatgtcatgcaaccagatctacctcaaccctaagtataagtcccatcatggactagccttcagggtccagccctagggctacatcggagaggatcaacaacatcccgatgcgtcccgctaaggcggggagcaaagattacgggctaatgtatacggacaacggagagagctctttgcgtgttactctcccatcaatagaaatctttcgcattttgccacaagatagaacttcaaggaccaggccaacccccatattctatgcttccactgtgtcttggaggttcctctcttggctgatattggggtttgggctcaattgctttgatagctatctatagctttcaccaccaacccaagcttccagccatcccatagtatggctcacgtcgttgagttacccggggagtcaaaccccttgactcctcagaatgttctcaatgctttggttttggcagcaagctcgacgcagcagcaggtgcacactggaacccagcaattgcaaaactgggaaaagcaagagaattactatacctccctccaggtaatttgataccgtaaaacctcttttacttttgccttactaacatgccgctctatctttaggatgtcttcctagatcactctgtacccaacgaagtccgataccttgcaatcatccaattgaagaacggcatcgataagtattggcgaaagaccgcgacaaagtaagcctatgcagacgcattcctataatggtgaagagttggagtttctaatctttgtatagcgctatcaaaaaggaagaaaaagagcagataaagaacagagccttacaagcgggcgtcgttgagcccgctgctcttctggctttacacaatgcattgatgatcgcgaagattatgcgttatgagtttcctcaggactggtgcgttttcttttcttcaagtccggtagctgttcttctaactacttcgtcaaggcctgacggtatctcatcgcttatcaacttcctccgttcctcaacccagcctggcgccaacccattacaattgccacggactcttacaatccttttgcagataatcaaggagctatcgacagcccggttgcaaaggacacgaaccaaccttcaatctgttgctccagagatcttccatcttctaggaagtatatatgtggacaaagtgaacaaatgggtatcgcttctagaacagggtgttgttgacgaaggagcattgttggagagtcttgagcaaagtctagtgtctctcaaggtcgttcggcgccttgtgatagctggatacgaacaccctaaccgtcataacgaagtcaaagatttttggctgttgactcattctcacttcagtcgcttccttcagttcatcagcggttccattagtctaccagagaatgtgcataaggcggtagagaaacatgttttacaactatcgaagctccatgtcgagatggccaaggatcgagctgcctcttttgcattactaccagacagtatttccctcgttcgatcatactggagtctagtggttaagctaggggagaactacgggcagttaggcgcaactggtgaacaagagggaaagtcgctgatggaaaaggctgggctcaaagcccttcttctgatcagagcttgttccaaaatggcattcaacccagctcagaccttcaagtaccagactcctgaagataaggaggagaaaaagcagtctattgaacttatcaaggcggaactctttacccatgactttgtggtcaatgtcatggagcttctcgttacacaatttttcaggttccgatcgagcgatttccaagaatgggaggaagaccctgaagaatgggaacggaaagaagaagatgtttccgacgcttgggagttctctattcgatcatgctctgagaaactcttccttgatctggtcatccatttcaaagacctgctcatcccgcgacttctaaacgtcttctacaactttgcaagtaagtacctgataccctaaagcagcgctgaactctgttgacaggatactgccaggtccggaaaatcgcgatgtgctactaaaggattcattatactcagcgatcggacttgcctccgcaagtctcgagcagcatttagatttcaacaaattcttagagactacacttgtcccagaagtgcagattcaagagcagggctataacgttttaagacggaggattgccattctcttgggccagtgggtcccagtcaagtcgagcgagctgaacacagaagccatctatcaaatcttccagcaccttcttagcaagcaagacccgttgaacgacttggtagtccgcatcacagctggtagacaactaaagaacgtgctttatccgttcgagttctcccccactgggtttctaccctatgctccctccatccttcatgacttgatgtccttggttcaagaggttgaactctctgaaacaaaaatggggcttttagatacggtccgcgtggctgtaatcaagatggaagaccatgtatgaactcccctaccccgctgtaccttcacacgggtatgctaatgactcttcagattgccccgttctcagatcagatattgtcgctgctacccccgctatgggaaagttccggggaggaacatctcatgaaacaggctatccttaccttactgtcatcgttgatcaactcccttaagcaagattcggcacgataccactcactcatcctacctctcattcagaactcggtggagccaggctctgtacgtctcacttcgctccttattgaactaatgcgtgcaggaatactgattcgcctacaggaaacactggtatatctgctcgatgaggcactagagctctggggggctatcttgacgcaaactccagctccagcttctcctgaaatcctttctcttcttcctgcacttctccccatttttgaagctgccacggatagtgttccgcaggcccttcaaatcgcagaatcttatatctaccttgcgccgcaagaggtgttgagtgaccgagtacgacttcctttcctcgcttctcttgaggccctcttgaaatctacaacacgccaacgcctcggcgtcgtgccacgcctagtcgaattaatggtacgtggcactgaggccgttgatggcggcagtgaaaactcatatagtgttatcacccggtcgctcctcgatagttccttcctgtcatctctcctggaaggcctctactccgcctacgaggccagccaaactactggacctaacagaaaacaaacacctgtatatggcgtcgttgaaacggactacttctccgttctcgcccgcttagcactggcgtacccaaagatgttcgcatcagctgtttccgccgcgacgggcacatctgaagaacatgcccttacctggctgctcactgaatggttccttcactatgacaatatcggaagcgcaacgcaaaagaaactccatgcgcttgcactcacccaactactcagcctgaatggtccagacacacaaccaccaccgtacatacttagtcacctccaatcctatctcaacacatgggcagacatcattaccgagctcgccgagggaaccgagaccgaaaataacccccgtgctggtgaccatctggtctactggaataacgcagaaacgggcaagtgggatgagaacgaaccgcccgaaaacgaacgcaagcgtcactgggaaaactccgatattctccacaatatcaagattcgcgacttcatccgagatcgactgcgctcgttaattgttggatgcggtggtgaacaacgatttcaagacgaatggctcctcaacgtcgaccgcgacgttgtgtctgcatttgtcgcacttgggcttttctgatagatcactctactccaaatcttgggcttgatttctaccttcaccccttgaagtggtcagttcccacccgacaatctactacacatgcatctctatgcggtctttgctgcttgcaagagtttcacgatccaaactccaatagggctagtggacagatgtctgttcgcatcttgagccccctatgcagccaaactgtgacagtgggtgctcatgatatttctaatgcgtcctgagttaatggtgttcatgaagggaaggaaaggcattgcatacagctttagtactagtgttattccctcagcgtattaccatcttagataaaaacaagccagggtcctttctggactcaaaaaccttttctaccttctcccgagttctttatggttatatctgatgactatgatttttctcttttatcaacaagtctgactgtgtgcattgtacatgacttgcagctcaaacttcttttactgccggatagcgataccacgggtatataaatcatgttgaggaaactctcagctgttggctgaaatactcgacctttctgcggaatacggtaggccaggcatccagtcacagctgatcgcacagtacgttaaacatacaaccatcagagactcccacccgcagctcccacaatcttaaggccactggctccgccacctccaggaccatctgctgtagtagagtacgcaagccaataacgcgagggatgccatgcgacggcaggaatgcccgaattcatcccgccaccagtaggaacagtataaacgctttcgcctgtttcagcatggaagatctcaattccattaccgccgcagcctacttcgtcacaagcaccgcaaataaatcttccgtcaaagctccagctcaccccgcggatggccccaccattattactagacacggtgcgtcgacaaatccaatccgatgtatcccagagggagataagggcgtcgctgccgccgacggcgagatagcgtccagtaggtgcgagggcaatggaaaggcaggcggatgtgtgagcattaagggtgtggaggacgtcgaaggatgggtaggataatattttgactgtgccttcgccggtggttgcgaagaggtgaagatcgggcgaagttggcgtggagatgtgatgagaaaaggttgttgcatttgtttggatgggctgtggatgggaatctaggactttgtaggtggttgggcctgcgatcggtttctgggactgcgtggatgggacatttattactccgttttcgagcacagttggggtagaaggtgattcaatggagattggtatcagagtatcatcctagtgattaaaattataccagtcagtccatgtttcagtcacttgtctaccctatacaaactcaaaggagctctcctcaccttccttccaaccaccattgtactcccatcagccgaccaagacaaggtgaatgcttcgccgccgacatctagacggctcacacaagtcttcgagcgaacatcccagaagcgcacggtaccatcagaagaacagctggctagctccgagtctcgaactgggttaaataagactttctcgatccccgcggtgtgaccgcggaggtcagtcgagtatttgacttgcgcgcgctcagggttccagattcgaagggtacggtccgctgagcctgtagcgataagctggccggtagggttccatgctatcgttcggattctgccaagaaagatatatactatcagcttgaacctgatctgggaggtgttgtgcagctgcaacagttttcttggacggaaacgcacgtatgagatccgggcgttcgcgcaatagggtcatgatagctctgagtcttgaggctcccaaatgagaatgcgaatcgctctttgggaagtagattgcggcggggaggtgccattgttcgtagctgctgtccctggcggagtcgtgacgatggcggcgatggcaggagcaacccacgttgatgccccgaggggctgtggtcaataagagttggaaggagctttcgcgaacgagtttaggtggttacccgggaattgcgaccaaagtatatagagcactactacgtagtagttgcgcggagaaatcgtgcgttgcatatcgatgtttggagtagcggcggcaatgataaaggcggatgatcaagctaattggtgccttggtgccttagacactgagaacttcatacaccgatggcgtatcattgatatcagcaattaccagttcggcgcattgtgtttcttggctgttcatatctggtgctaaaagtgagcctgtacacatatttatactaaactgtggaaagtcgttaacccgcttccattgttgttcgagatatattttcgccacatcaatcattatagttgtatgaaacaattcaagaagacaaaaagtcaggagaaagcgagagacaacatagagaaccctgctataagcaatacacttcaaataatcactacatatcttttcctgaatgtaatgattggatttgaaataggtttatagaatcgaagatgacgaccgaatccgtttactttttggggcccattgtccaatcagatgatgtccgcttttccatcgcatccaaaagacatcaaatttcaatgtcaagtcgtttctgacgaactgtcaacacaaccgatttgatgatctctcattattattaattcctcatttgctcacagtaggtagagcattgccagaagactgagataattctccattgttgttcttcagactaataacctttaacagattcttccaaccaaccacagcgcgccgtttgatttgatctcaaaatctcagcgtatagggctacatatatatagagattgcccaagacagaatcgctatgttcgatctggaagatgacgcgtctaggcgcgagaaatgctacacggcagtggctcaactgccttccttcatcgaccccaaacagccacccgtgaaaaagtcgcccttttcggccattcggggacatccgttcgtgcacacggtaattgtcccttttattcctccattatcacttccctcgtttggaattccttagttgatcaggtatgaataggtggaggttatattgcctgaagcaacctacaaatccattgagagctccttaaatactaagcttcccaagctgcgatatgctagagtgttcatgtcactgtcgtctctgcttgagggagacttcttcaatacttatatcaaatctggtacctaagaatctactataatgatcccgcttcatccgatggagatcaatattgtagatgggggctatactaactacgtttaggaaatattctcatgatatcagagggacgtcctggttcagataacgtatttaccctgagagatggtatggtatactgtttccgggcatagtgttcatccggcaactgttgcagactgacatacatttaggaatcttgaaactagagcttggcaaggagatatttgaacggacaggtctaacaggaaagcccgtccgtagtgggggcagaaaacatgcaaaggaaagatatcgtacgtatctatatgacatgtcttcaccctacatttatatacttatgttccaacagtcgtggaaatcaacctgcggctgccatcaatgcttcacggtaagaaaggctttgagagactagtatgggcattcaagaatgttctcaatcacactgtggcctggctcttctatgacctggcatcggagtcgagtggtgtttcctctggtactataacccacattttccgcccttctattcacatactgacgaatgactagacgatccttccctgaaaggaaaccaccctcacattgtagactgcgaaccagtgcgcactgattaccgcgatatcctcgtcccaccctttaaggaattggacattacaggaacggcgccagagcaggaattgaaggaaaactgtgacgaaatctctgaatggcttgggatggtggccctcggatctccccgagtattagcgagtgacgatgtagacccatacttatgtcgctatagcgtaccgcacgtcgacgaagcaaaaccgtcagatatagtcagtttgagatggcatggtttcctccctctcaaatggattatggagctattccttactctactgtatgttgttgattctatcccgccaactccctgttagtttatgagcatcgcatgctgactacttgattcccaggcaagagactgccccgaaaggtccagaggcctcggcctggtttgctttctccgcgagtgctctggggagggaagctgtggaaggaaaagacggttatacggttctgacattgccttctgtaaacgaaacttgtgataatgtgcagaagagctctgatcctagatctaaaataggtcgctcatgcgtttgctgggagtacgttggcgtctcaattgtttagaaatggagcatatatcccacactgctttaggtgtgtacacatccaaactgatatcaaccgagagaaacctaaacataaaagtgacatgtcctggcatagtcatcagttggttacctcaaccaatgcatctttaccttcaaacgctagggtctgcgagccgtatgtacgacttgttctacattgttctttacggttagttgcattgtagattgaattgcacataaagaagaactgctgagatatagagcacgaattactgatccaatatataaagccaaccgtataatggtatcaacctgtatccaaaatctgatgtcccagctgctcctgtccctctaagtcatttgcccaatccccagttaaaagtatatatgaaccctaacgaaacaatactcataaacagaaaacgtatccaagagagtacaaaaaaatcaaatatgttaaatggctacaatcatccaataaggtcgttcaccacatcttgaagcactggtctattcccaagaaccttgttaccactcagcagcttaactcccttttttgcgggcttcctgagacccttcggagcatttcgggcttgtgctggacttagagggttgcggaccttcttttgagaggttggactcttcttcggactgggtgttgatccttcttgtggctggggttgtgtatggatgttgtcagagtcgaagacgtgatcttccacagcgccctttggtaaattatatacccagccttgctcttcgacaagcttcacatatttgcctagtagctcattaccgccacgaagagtgctcttgctcccaacaacaaggagcttggttcgtgcccgggtaaaagcaacgttaacccgtctccagtcacggagaagatcgccgacatggttgtctgaattgctgcgcacacagctcagtaccacaacttctttgtcacgtccttgaaatttgtctgcggtgtgcatttcgagatccggcaggtgacggcgcaaattctgtttcagaagcgaaagttggctgcggtagaacgttatgacaccaatgcttcgtgctggtataccgcaagagatgaaggcttctacgagttgggcgcaaagtgttgcctcggtagggttaacgatacgcgacccctgtgcgacgtctaaggctggtgtggctagggtgtctgtgttaacaaggcgggttttggcggatgggtcgaccaaatcgcgaagccagcagcgaccctgacttgtacctaaacagagctgcctttgccctgggggctggaaatggtccaaatgaagatgtctgagaccgccaatattgggaacctccaaagatcgcgcagcaacctcctgggtaccacatttgagctgccctgagtatatgagggtatttgagaggagcataatgtctttgcacattcgatactgatgttcaagattgacgactgatgccggatgagaatctgagagaagcttgaagagactaacatcaagtcccccttcttgagcctccttattttgcacaagaggtggcagttggtaatgatcgccgaccaggatgaatgtccttgccattcggatcggacctaaacatacaggcaaggtgatctgagaggcttcgtcgacaatgcaataatcgaatatgcgctgactaaaaatgctgtggccgattccaagacaggttgttgcaacaacctgcgagtcctcatatgccccctgaagttcttcgattgtgtttttgggaactgccgcaaggtcggcaaattgctgaacctcaggatgcactttcgctgcagctccaatgcgtaagatacgaatgttgtcatctcgaatcttcaaaagtatgttgtcaactgctgtatgagtgtatgatgtcaggagcacacttttcccttgcgatactaatgcacgaattatgtgggcaatggttgtcgtcttgcctgtccccggcattcccaaaaccaaagcatagtccttagcgctcattactttatcaatagctcgtttctgatcaacatttaggcttgctctgtcggtgtcagacatcttgtacgctgtcaatgtgggttgaaatgtgggcgcggatccttcaacgatcagtctcctaagattcttggcctgaaacaagtctctttccatcatagcaactagatttgctcgaacaatggccatgccattactgaactcgtctttatccagtcggtaaacgacctcttcttctggttcatctgatggatttgaggaagcagcatcggcaccaggaatttccattatgcccctgaatgtctgattcattttggcatcgaagcctttggacttggttctggcattgtgcagtcggcgatccactgccacagagatgcgttgcggactgacttgcacgacatagccattagcaagcgcaaagtgacccttttcatcagatatcacgatcggctctccaactgtgagctgtgactcagaaaaagaaaaagatagtgttggctgtcttttgacaaaggtatagcgatagcgatttatctttaccccgtctttgtcttcaaaggctgaccctggctcgattacaatgttgctgaagcaccggccgagagcctcccgctcgctgcttaacaatgtccaaagctcccgcttgaatctcatcatactttgctcctccttcgtgagcagatcatcccattttcggaaaaagtcactatctctgggtgtcaggtggtccatagccttcacgaactcatcaccgagcccgcttgattcgccgtcgccatcatcaaccagcttgtgatagataaagcaaggcgtcttggagaagcatttattgcacaaagcctgccttttaaccatgggtggtagttgggttcttcggcacatatagccagctactcgatttcgcgcttgtatcatctggaggagctcatgacgaatgccacgaattcggaaaattttcgacgtctcgaggtaatagagaaggccgaatgtaacttccacatctgatgaagataggtcaggttagaataagcgcaactattagtgacaaggcctaggctcaccgtagcgatcagaaaggagaagggtatagagagccgtctgggccctatgagcatgatttgtgtctctgttacccgtcttaagctcaaggggcacaaccaaattcttgttgccctcgccatcatggcaggcaacttgcacagtagcatcgatattgccttttaatccatacattggagaccagatgtgttcttcaacctcaagtagcttgttgatactcaggcggagcttggagctatttcggtcttcaacaagggattgcgcctattgatgaatgttagtacgcgtactgtcgtatgttgctgaaaaatccactcacgctcggcttttccttaaggaaagtgtctgcccatgagatcaaggctgggattttgcccatcacataatcgataacttcaggaatgctcatgtggatcaagtacagttcctcaatatgcttcacaatgaccatttcgaccaaggaccttagtgaagatatgtcccattgattggccttcattgcctcttggaagacttcatggaagatattcccaaaaacttggggctttccaatgtcaccggtgtttttaatacggtcttgaagcacagctcgccgctggcaaccaatcgaatccgcgacaattgtcgccgaaactaaatggtccgggtgaagaatgatcatgttgtaagaattattgacgatgcaatggcctgctgtatcaaaatcaccgatcaagtgaatgtatgaatctttgtaacatggactatcaaaccatgattcccgcaggacaacggccttcttctgagaggttctttcatcttgtacagacaacacctgattacaatgtcagcttctacctgtgcggcttctagagtatgcaacggcaaaccttttctggctggaggcgccccttttcggtagtataggtagactcagcaatatcaacaatcaagtagcgcttgatggcttgccgactaaaattctatttataatatacttagcaaatatctagtaaatatacccactaagagtgacaaacatagtttgctccatcggcacctgactgtctcatagactgctcgatagcctccatgtcaaattcatcatcgttaaactcgtcactagaggattccccctgtggcacgttcaccccttggactggcttcaccatcaccgtagacgagctctctgtgccactttccagtccagataggttggaggccgtattattctttgggatgggcctcactagcttcttatttggagccgcgtcgcactcggcaaggatttcatctatattatccgaaaagtcatcaaattcatcatcatcatcaaagtcagccgtattgagggaatagtccattttctcgttaggtcccgcttctgaattcagagtcgttggatgggcatgggggttttgctttgcattatgtggctcgttggcgttcgtcgaaaggaacgtcgtatctcccccagtatccattgcgcctggtaagctaccatggtcaacaaatggatccatagaggcttctgcaagttcaaaaaacccttgatcaaagtcgtcgtccccgaactcagacgaagaggcctgctctttgtcttggggttcaggatagacttcactggccttgttaacccgatttgctttagatgaagaatggtggccaggtctatcttgcatgggagacgctgaccgacttcgttgcatgcctttgcatctaggcacaggcgatgaatcggctgcaacgatgtgggatttcggtgacttgggcgcatctcggagactcttttcgatcctttccacgagaaaattgatcttagacgaattgatacctcccgagtcaacgacattgcttcttgtccgagaaaagatgccgcggcctgtgccaatgcctccgccatcgaccctccttcgtttagctttagaactgggccattcggcattgcaactatttgatcgtcttaagccagatgaatcgcgacctgtcctggccggtgcgggagtctgtggtgaggaggaaagaaggtgtgtgaactgaggtggtggtagagttccattgccgttggcagtgagtttacccacatagttgttccatagttcggtagcgaggtcgttctgtggagtcctttgaagcccttgcaatggcgtatgcatgtcaagagattcttgatctgcacctttcgaatttccagccaagggcgaactggttggtgaagagatatgccggcgttttctggcttgtgttgcaggcgtttgagacatcgtgtccgggtttgaactcacggggacatgctgccaaatgacatagtcttcaggtgtaaactctggcgctggggcttggctgatggcatcttcagtattgctaatcaaatctgccaatggaatcctatttccaggagtttgagggcattccttggttgccttcgcatctgatttatcaaccgaagcttctcttttggtcgaatcggcttgatctgaatgagtgacaccattcagccacgatgattgattctccttgttcgcatgtgctggctttatggacgatttggacggcgatttggacggggatctcttagacggtgatttttcaatacttttatcatctctgatgtaccgaaaagcattcagcttcgagcgggaattcgaggaaataggatatgaattggtgtccttatttatggggttcatatttagagctgctcgtcttctgtacgagagcagcagagcatctcgattagttagtcttaagtggatatagttagtaatgaaaagcctgcatgacctgcggaaaatgtatacgagttagtcgacgtactgagatgaagaatatagaagacgattattttccaattctggagatcattcaaggaattgacatgcatgaatctaactcgagtaggatttgtgtcttgacgcatgcaatcgcctgaatcacggaccttagatggagatgcgataagggagtcactagacgcgtcgcgcgcgtcgatttataatgcctcaggcagcatttacgccttgaaatacaggcataaagacggtatgcgaactgacccgatcgggactagcgtaatgactccatcggccttttgcggcttctgaacatcaaccgctgttcaaaccatcacccctccaacttaacgcctcctgccccttcaacgacagcggtcggatcaggaactgatcaattggaccaatcattatcatcgctggtcgaaggaacatcgaatttaacgtcttaacccgaccgtcctttcctgcttgacaggggcctcaacccgccaccgcctgtcccttatcatcgactgctttaaggaccaggaattcgttagattctccgctacacttcatagccgcaatgtctgctcgtactttgtcgcatagccttcgcagccgctgccttttgcgcagacctcagaacattcagggtttctcgactcgtaccaacctccgtgccgctgatcatggagatcactacgatcctccgactgggtggctttttggtgtcaagccaggccagaagtacgtgaaggaaggctgggagaacatctggtactacggattcattggcagcttgcttgttgccggtgtcgcatacgttttcaagccagacacctcgtacgtcaatcccttgggcttcggcaagctcgctataattagcagaagtcgctatgctacatgaaatgtggaaacctacttgtgcacaaaactaactccatggcaggatacaaacatgggctttggaagaggcacggcggagactggaagccgagggtattctggaggaccccgagaaagctcagaggaagtaaaggacaaatctgtcctgagtatttccttgtacattgtacatagagcggtcggacatggaaaacagtttcggatgagatgttgtacctgtgctagcggatatgattcgccagctcagtctagacaggtctttttattccctttcctatgttcttttttcttcttaaattctgcatgtactctgtccacctatattctgggatgctttcaccaattgctttagaaagttgcgcaaaagcaaagaatacaaatgtccaatcgcaaatagcattctatttattgtctagtctcagccttctccgatattatcgggtaacggtttatacacgatgattggtctacttatatccccgcccagttaccactaccacggattaggccattatacctctggatatatatctgtccttctaagaagtggtatctctctcctaaccttcgctagaaggtccaaatcaatatccgcgaaggcgatctgcggttctgtatattcgtcgccaagctgagctacaatctctccccaggggttcacaatcatcgaatggccatagcttcttcttttttcattgtgaggccctgcttgcgccgctgctatcacatatgactgagtctcgatagccctggcccgtaggagtgtttcccaatgggcctttcccgtgggaaccgtgaatgctgaaggataagtgataagctgggcattttgccgcttcaaagccagactaatttcggggaaccggagctgcaagatgatataagtaaactcatccaaaaaacccccaaatcaggcctttttccgatgacttacatcgaagcatatagctaagccgacatgtccaacaggggtctcgaatggaggtaaaatttccatgcctttctcgacactcctgaaaataatagtcagtaaatctactagatactcatattatactctctggggcaacccacgcgctctccttcagtaccggaccgcctttgagttctacatcaaatagatgaactttctgatagcgctgtgtaatgatgcccttttcattgatccagataagggtattctttactcttccatccggagatggttcatgaatgccgacatttatgtgtaaattagactgcacggcctccttctgcaggcccagtacgaattcactatcatgcacggagcgcgcaagtgagattgtttctgctggcgaggaccctatatagtctgtcgcttcagggagaaacaatgcctgatcatgtatcagtcagaaatctgcaagccaatgacatatactgtactctagctccagcagcaacggctttgcgcaccagtatctggcactgggccagattggcagtcatgctcgcagtcgagcataattgccccacagcctatcgagttaataagaagttagtggctaacttaagagtcgctcctcttttctttgttatcttaaggaccccttactgcaataaccatattcgcttaattaaaacttagactctgtctgcagtgaaattgtattagagtgtatgccatctattggaaaggtagttgtactaactggtgaagcacgttatctgatactatgattagtgaggtaatcggcagactttccctttttgggacaacatttatctctggagctgcgctccagcagcgaaaccgattctgaacgaacgtcactgactgcaccaaccatcacaaaaagcagctttaaaaataaaaagaaacctgacgccaccggtcaggtcacatagctgccaatatgaaaagcttacggagggatttctcttctgacccgcataccgcaaatgtcaccagcaaagtcttcgtcaggtcgacaaaaagtggaaaggtgcaaaagatcgttcgtgagctttatctgagacaggatattccttgctcatcgaagctgtgctcaacatgtccctcggtcgctccagcagatgcaaatggaaacagtgagtaaaatcggtgtaaaacactgcttctagtggctaatgcgacacagttgcgcctttcgttctttcggagcaccccgccggcacaaccgcttttcctcgtggtcattacctcgtccctgatacgaacgcgctgttgaatggtatggatttgtttgaacataccggtgcattctatgatgtgatcatccttcaaacagttctcgaagaacttaagaaccagtctctacccctctacaaccgcttgcttgccttgatcaaaaccgacgagaaacgcttttacctattcttcaacgagtttagaatggaaacacatgtacggcgaggacgaaatgaatcgattaatgacagaaatgaccgtgcagtccgttctgtagcaaaatggtacaccgaacatctacgagccgcagcgaaaaagggaaagaaagagaagacagtacctactattgttgttatcacggacgacaaagacagtttgcgcaaggcaaaggaggagaacgtgacagccctgtcattaaccgattacgtctcgggtttggaggattccgatagattactcgacatgatcaacgagtcaagagaacagagagagactaagggtgcacgtggagagctgttttacccggaatactatactatgtccaagatcatgactggattgagggccggtaccttacatcaaggtgttttcaatgtgtccccatacaattatcttgagggttccgtcaatgtcgcagcattcgacaagcctcttcttatcctgggtcgcgacaacagtaacagagctatttccggggacgttgttgtgattgaagtgcttcctaaggatcagtggaaatctccatcaactaagattgttgatgaggaagcagtaaccaagaatgacaaccctgacgctgaggacaatgaggccgtggtcactgaaagggaaagaaaagctttgcaggaagaggtcagacaagcgcatggaaagagcacagaaggaaggcctcagccaactgccaaggttgtgggcgtgattaaacgaaactggcggcagtacgtcgggcacgttgactcgggctcgacaggctcccaagctagctctggtcggcgtcagcaaaatgttttcgttttgcccatggacaagcgtgtacctaagatcagggtccgcaccaggcaagcctccgaactgctgggtcaacgaattcttgtcacaatcgatgcatgggatcgtgattctcggtatcctactgggcactttatccgttcattaggagagctcgaaacaaagggagccgagaccgaagccctgctactcgaatatgatgtacaatataagccgttccctcaagccgttctcgactgtctgcccgcagaaggacatgactggagagttcccgctagtaaggaagacatcggctggaaaggccgcagagacctcagagatctccttatatgtagtattgacccaccaggctgccaggacattgacgatgctcttcatgcgcgaccattgcccaatggcaactttgaagttggagtccatatcgcagatgtatcacatttcgttaaaccgaataatgcgatggacctcgaggctagtctgcgtggcacaacagtctatctagtcgacaagcgtatcgatatgcttccacatttgcttggtaccgatctttgttcgctcaagccttacgtggaacgttatgctttctcggttctgtgggagatgactccaaatgctgaggttgtctctacagacttcaccaaatccgtcattcgttctcgtgaagcttttagttacgagcaggcccagatgcgcattgacgatccatcgaaaaaagatgaattaacggagagcatgcgcactttgcttcggttctccaagattctccgtcagaagcgtatggacgcaggtgcactgaacctggcctcgcctgaagttcgtatcgaggccgataacgacgaggttggagatccacttacggatgtcaagacaaaagctatgctcgcaaccaacagtcttgttgaagaatttatgcttcacgccaatatcactgttgcagctaaaatctacagtacattttcccaaactgctatgctacgacgacacgccacccctccaccacagaactttgaagagctcattaatcaactttccaagaagcgggatatgagacttgatgtttctagctcacgcgccctggcggactcgctcgaccaatgtgttgattctaagaaccccttctttaacaccctggtccgcattctcgctacccgatgcatgacatctgcagagtatttctgcgcaggtgctcatgccgagtcggaattccgtcactatggtttagcctctcccatctacacgcactttacctcaccaatccgacgatatgccgacttgttggttcatcggcaacttgcatctgctattggatatgaaggtgaagacggccgggcagtcattgaaggtgtcatgacccgcaaccgtctcgaagacatctgccgcaatatcaaccaccgccaccgcaatgcccagcatgctggtcgagccagcatcgaatactacgttggtcaggcactgaaagcgcgcggcgagaagctatctgctaagggagtggacggcggtattgaagaagaaggttacgtcatgcgggtttttgagaatggcgtagtggtgttcgttccgcgattcggtatcgagggtgtggtgcgtctggaagactttgtgctcaagggcgattctgccctacgctctgttgaggaacggcgagagctagtagtccgtcgggagagcgagtttgacaacgaggaatacactcttcaagtttcggataagggccactctgatcaaggtatgagcgtggaactcttccagagagtgaaggtcaacgtcagctccgtgaaggaagagagtggccggggtgccggaaagagaagggttagggtgttgattttgggaacccaaaattagggacaaagaaaggaaagaaaatagcatgtctaatgatggcatttgggtgttggtcataaaaaacgagatcatctggagtctagtggtattataaataggtcatgtattactgtctgatccatgtatacttcttccatttacagtattagactggataatgtctatccaattgcatttacccgaatcactgctgtcacactcttttcagtgtaaccatgccacgaagtagtgcaactggcgaccagagcttaacctcaggtactggatcggaagctggaggttccaccgccggctggttgcccttctcatctccagccccatgggagcttgccaccttaacgccgtcattattagcggacaccgcagtagaggattttagttgagcttcccggttgatatattccactttccaacctcgaaccacccacaagcacaacgacgcaccaatgtacataaacccggtaaagatctgaaccctcaggtaaacagagtcgttggagtcgttgtccctcaagacaagagcgatggcttcagaaaccgtcgtaggagcaacaagaatgatccaagtaatgctaagcccgctgggcaggtctctcaagcctatgatctccgcaagcacaggcgtaacagttgcccagtacgtcccagccacagtaccaacaaggacagcaaagaagcaaacgacacccatactgcgcgcaaagatccaaataaccagacagaacaaaccgcagcagaaggaaagaaacgtagcaatgttgatgcgaccgagtttgtcgctgaacattcccacaaaggggcgaccaaggccttgaccaagattcagcaaggcactgacaatactaccctggtgggatgaaaggccgaccgagagggcgaaattggctacgctgaataggagggcgacatagcctaacatactgaagacgccccagccgagaaagaggagaaattcaggccgtttgaataagggaaagtggaaggccttgtgacgacttccgacgtctttgttgcggtcttttatgagatttgcgcatattaggttgacgacgaatgcaatgatacccaagattcggaaggcccagctgagtcccagtcgagggatcatggagcctactgctagggaccagattaaacctcccagaccggacccggcggcgttgatgcccatcgcgagacttcgtcgtcgctggaaccattgagggatgatacctacgcttccgacgaagagaaatcccattccccatccgaaacagacgccttggctaaggaagatgtgccacctttgcgtggcgaaggaagatccaatcagcgaaagggtctcaaaaaagacgcccagatttaggacaagacgtgtcccatagaggtgaatcaggtgggtggctaaaggagcaaccaagagagcacaggatatgctcaaaccaccggtgaaggcgtatgagagtgcagaggtatttgggaatacatcgtgtgaaagataataagagaggaatacaccgtaactctttaaccagcggtcagtctatcctgcgtttcgatttaagagacgatgaaaattaggagacgaacactgttgattccccatgtatgtgcattaatccagaagacacaggcgacacaaacccacccatagccaccatctggggggacatcacgttgatacttgtcttctaggacctcctgagctgcgtcttgctgcccatccagctcggtttgatcttgacaatggcctttcctatttagtggatcctgcgaaattaactcacggtcataatcgcgagagcgaactatatcgataggagtgttgtctgccattcatgcgacgaaaaatagataaaagtaatgtgtgattttgcgtctctccctccgcttactatacatgagaggacataactatgctcatgaaagaatagaccctatagataaaatagagagaaggctggagtaaagtagtccaagaaactaagggaacatgaactaataaaagtcgaaattgatgtgtcatgcattcaacaagagacgctatgacagtctgataatcgcatcctgccgacaaggattattgaaccacggtaaagaccccggcagtcccagagaccgtcattgggctattgccccagaaattaattgaggacggatataatgccgagtagccggtggagcaaagcttggaagttggagacggagggaaatccggagaaatttggggtatcaatttggttggtaaggtcaagagaggtctcattgtgctaacagaggacgaattgtacaggggagatattgagcagagagagattcatgtgtgtcacatggtccatgataagatgctcatttcattgtctgatgcctccagcatgtagaacctgtattgcccaaggtaggaacgccctaaaagatagtacatcggagcattctgacagcgagcatattaggggagccatggtcaatgcccgatgacgcttgacccattgtagagaccatcttaggttttagggttagtgttgcctactgcggttagttcctcgagatgaacccccgcgttgcctttgcgaccatgtgaaacctgtgtttgcaatgtttgcaatgggtttgttgttgtttccccctttcagtcatccaaatgcccattgttccggttgttatgatcaactgaaaaccactccaaccagtgccggacagactaaccctacagagcaatattaaattaatcaattactgctgttcctccatctaagactaacagactttaagcatatctctttgtgacgatactctaatcgtcgcagcggggctgaagagatctttctagcctaatctatcattgtgcccaccccagccaccttctggaacattattggctcactgatcaattatatgggaaactgacttcatagctgaacaacacatcaatcgattctgatgcctctcaggatacctttcccttgaggactctcttccaggcaaacaccacaccatgtatagaccatatttgcaccataacaagaccaaagatggccaacggaaggtctcccctcccgggccatcatacatgtccgacgatcaggttggtaagtctacattgttagctgcgtaatggcattcttcactctgcaagttgttggcggtgcgatcgcatttttatttttagaacttatctcctagatactaacatgtggctaaccttctctcctgtgcagcaaattatctgaaggacctacggacaaataggccaacccgcccaggcggatcgaggccactccctacgaagccagctgattcaaatcctcgagaggacctccctccaagggcagcatcagcgatgtcttcatactcacattcaaggatgccgtccaccactacagcgggcgatagggagccgccccgcgctaccagttctttatcgaaccatcgtcctctatcttctcgaggatccataggcagtccggctggacgaccgctggtccaagaaccccgaatggtacccgttcggaagaatatctctccaacgcgggttttctctcgtcccagccctccatctccaaacgcagcatatcgcgagagttaccgacgtcggtttgaaagagaggaagcccaatctctccgagatgcactgcaggagatggatatccaagatgatattcgcctccatcaagctgcccaggatgaggccacagaactggtttggatgcaccaaaaccctggattgcccttcaagaacccatacgctccttatcgtaatcccgatatggataaagccagtcaaggatcagataagagtagcgttctagttggtcatactctcgcttccagaagtccgcggcgggacagttatcgtcccatgtcagactacaactcggactcacccagatcacacgccaaggaacagcaacctgctttggaagaaccaaattccagccccagaaagaatggcacactccgaaagaatctcaaagttgatttttccttgcctcaaaatgggagcccgtcaaaacgatcgagcagtggctacggactgggcctcgcgagtaccggcaatggttcgtcaaagggtgtttttcgaaaccccaatgaccacatatatgaagagcctggggagtctcagcatatggagaatgatgaacgcccagatttttcaaaatctgattcgtccgccttaaaagtcaaaccacgtaatgccttacctcgaggctcgaggcccctctctggccgatttggcagcctttcgttcgtcgataaactgtctcgttttgagctacacaagcatcccccaacgcagtcaagaaatcctgagtataaggccaacgatcccctcccgcaggcaaatccgaatgatgaacaagccatcccgaaaaaagatggacttgagattcgaagtgacgagattcgcgcagcgacaagtaagaagctcaaagaccgaagtacaaggctgcccatgccaaccgccgtgagtgatcgcgccggccgaccgattgtgagctttgatccaacctggaagcccaccgaggcccaatccccaggcaagggtaatgacgctggaatacgtgaatccgtttcaccaacaccaccccccgcacctgttgctcctacaatcgagatatctgaagcgccttctattccagtgattaacctaccggatgacaagccacctactatttctgagatgacagggtcatcacaggatcgtaagaaagatgatagctctctcccaacctcacccgatagtagcaagcgcccaaatccattccagaggaaatcgccatcatcggctctgcaaaaccgttggctatcaacttacagtcgggctggtgtcccaacggcgaagtgcgaatcctgcactcttccgatttctggaaagattgtcactgctgccggatcacggttccatccagaatgtttcatatgccatcactgtcagacaccgcttgaatgtgtggccttctaccaagagcctgatgcaaaacgccaggaacgactggcagcggcttcggaagccgacgaggaagcccgtttgctgaggttctattgtcatcttgactttcatgaactgttcagcccgagatgcaagagctgcaagacccctattgaaggagaagtggttgtagcatgtggtgctgaatggcatgtgggccacttcttctgtgctgagtgtggtgatgtatgatcaacctaagagcttaaagttcgagtaataaaatgctaactatacttttccatagccttttgaccatgaaacaccatttgtagaaaaggatggctttgcatggtgtcttcaatgtcattcccggcgcactgctcctcgatgctcggggtgcaaaaaaccggtactcgatgatgttgtcatcacggctgtcggaggtcagtggcatgatgagtgctttgtctgtcacgaatgcagtgctgagtttgggccggatggtcgatattttgtccgagaaggcgagcccaaaagaacagcaaaaggccgcatcattggaggaccagtccagttacctgtatgcgaaagatgcgagggtatacgacttaaagcgtcgccttagctttaatgacgactgcaccagaaactccgaaaaggcacgattttatcatctaaacgaagttttattgacttacttacagtgcttgtaactgttcgcagcatcttgggtgttggaagtagagtcttatctttttattttgtttttcttcttttctttttggtatattatgcattttacaagttatgtcatctgttgcatatgcagcaagcgggagtatgcattatgtgagtgtgtgtgtcaatcactagtagcgtccgccatcttgccgtacctgctggagttgggcagtcttgtgtgccattaagctatggacagggtcatggaactggcttctagctagggtattttttttttcgggctataggcttttgtaactgaaattactatatacatatgttaggggttcgagcactggtttccagccgcaaaaatctatgttagtatgagacgccgtagccagaagcagcaatagaaataactagggcatatcaagcaggccattcggggtcggccttgcgacggaaaacagccacatatttgtttcccttgttcctggtgaccttcttgccttcctccgtagactccctcataacctcgacacagggatcacttgccaattcctcctcagatacccgctcaaagagatctttcactccaccttcactcgcttcatgttcaccttcctctcggaaatgcctcaaaacccaatgatggtactcctccacatcagtgatcgtatacaaaagacccccaggcttcagcgcgtaggcatattcagcattcagattctcagaaataattcgggccttgtgcttcttggccttgaaatgagggtccgggaagcaaataaagatcttagataattgctgcttgccgaagaagttggggaagaacttcatcgtattactgcggagggcgctgatgttctgatatccgcccgggacagggctattggatgtttcgggggtggaggctgcgtccggagaggctccatcggtggctggttcggcagggattgccggtgctggggattcggaggcggttgtagaggagttcttgagctggttctgttgggttcggagtgcttggatgcggttttctacatattcgataacttgggtgcggatttccatgcctatttcaattattagtcaatattcctttaccagtaaagatctgaaaaggactgcaggataagatcaatgaattgacaagatcgtgaacataccaagcatcagagtctcaggtaataacggcgcaaggccaacaagcaatccaccgaacccgcatccaatatccacaacctcgacatctttcagaagtttcctcgcgcccgccagattcttttgctcaggatcagggttcacgaacgccggataatgcgacgaccagtccatatgcgccggactgagcggactagagcgttcagttagcactcacaaaacccacgaacccacgcaattgatagatctacatactaatccaattgatggtctgagaagggattcgcgtgtgcacgctgccgatagaatttcttttggggcagtttaaccttgcccgtgtcttcgttggctgcggccgccgctcttttacggtattgatcgcgcttttggcgcttggccgggggagtggacattgtgattatggtcgactatattattatgactggaattgatttgcgaagtagagttgtaaggggacgattgatggccgttgtggagggggtggggtgtattcgactgtgatgcgatcggatgaagtgcggaaatttatttcaagatggagttaaggttatgggggaccggagataaagctcacatgcttgtcagtgacttagattcaacttccccagtctcctaccatttgattctcgttcaacggctttcctttcaggatcgcactatacggttacttattatatagttactttcatatttgcagctcccaatatcactgaccagctcattacccgtctcatcactgatcaaagtggtatcactctaactccccacctatctatcaaccgttatcaacccctccgcacgtcaatatccccaaacatacaactataattatacaacaggctcatattgacaaagccacggactcatcgcatctaagcaaaatctaaagaagagaaggagatgtctaattctactccctttcaattcccaccgacctactccttccccccattcttcacaccccagccgaacagcacaacacgactctcgcagctccaaaaatggtccttattaattcaatcctggtgtcgccaccaccgaacataccgtctctccttaatagaagctatcgagtcaccgttattccataattccacgctgcggaaacgaattccattgtccgaggcgcggaatatcttggactggatggcagagagcgaagagaagggtggaggaggaaggagggcggagtgggttgatgggacgaataagacgattgcttgggtttggtggaggaggccggaggagtgggcgggaatactggcagattgggtatgttattttcccggatggggcaaacgctcgaatgctgatgcttggtgtcgtgggtaggttgagaataccggacaaaagaacgtggttttgacggtttatgagttggttgaaggggaggccactatgtcacaaggtaggtcatgtgcgagttttgcgtgacgtctgctgacgctcgatagaatggcatggcatggatgtagatgttatgatgaagtcgctcaatgtcctcgtgaaacggggcaaggcccaggtctttggtagtgagggccaggaaggtgttaagtttttctgatgagagcatttatctaacgcaggtcttgaaatcatgcactctcatcatggctgttcattaaatcgctcagatacgataagtaacttctacatcataattccagaatatacacagaagaatcactccgcagggtcaagaaccccgagaggcccagaaaaagcccggacaagcaaaaagcaaacccattgtacaggaacaccctaactcccctgtagacatgggcttactcctccatcttgtcggacatgtcttcactaagctcatactcatctgctgcgcgtaattcttgcgacatcacaatgtcaagaagccaatccacgcgcacaatccgcggcgtcttgccaataccctgcaccatctggcggaaccgcggccatagtctttggtgctcaggtactacactgctgaggaggtacacttctttccgactccagctatcgtctttgtcactatcatcatcactctcttctcgttgtgcttggtacgaaacgcgtccgcggaagagcgtaaaatttcctccattggtgtcaacaatggatttgaaggcttcaaacccccctcgaatggattcgacacaatagatctgatacccctgcaaaagcctgttcttgttttccttcgcgttgctcagggctacctctaaagagaacccgaatcgcttttctgcagccttgtcctccaagacgtaaccggcaggatctaaaagctcgttctttttaaggcatgctgtgatgaaatcggtgctaatgatcattgggctataagcaagtgcgttgacgaacttaggggttcgaagtatagacggggcagcaaggtgagaacatttccgggcatcttggacaacctggactccaagttctcgaagttgtcgctatatgccattagtttctgtctcggggcgaataaagccattataacatgaggtgagtttcacaaaccttgtctgcatcttctttcttcatgtttccgacccacttttggtatcccgtgattaatagatgcattgttacgggaggctttgatttcttttgcctctttgcctccgttgcttcgtcctcgtcgctattagcctcaggctcgagtgaccttcgcttcttagcatttagtgtaacacggtcctcatctgtctttttgcgacctccatagatcacaccaccaacacgcttcctttccttctcgtacagcgcaatatccggagcaatgtcatgaagacgggcagctgcggcttccttggacttccgactacttgttgatgatggagtgtcgttctccttgccttccgacataagtcgggtacgcgcgggcgtctgtagcttcctgctatctgaaggtttccgcgacttgccagctggtgttgcattccatgcatccgagacatctttgtcatcttccagctctttcgcctgtggtggctgcatagaaactgtcgcctttccggctgtagcattttgatccctgttctgcatgactcgccgcgggcttgtggcagcttcgggcttgtgttctgaaggaaaaaagaggctttcgagagtacccctgtccagccgtgtttgaccaactacctcgcccaggttcgtccgtcgaggaaagtgcgtataacggggatcggaaaccggctgcagcttccacttagcgtaactctcttcaagccacaagtgattgactacatgcagcccccattcttttgctgcggagcacttttcactgtttccatgagcagtgaccaaatgtgtgttgtcttgtttcaaagtcttggtacattctgcacctgatgcggcgactagattttccagataagatctagcttccccaacataattggacaaactgatcttaaatccttcaaaacccgggattgcagtgcgcggtacaggatagtgcagcaatcgccgcaggggcgaggtccaggtgttgtatgttatcaaatgataaagccaagataagtttccaacctctttattcagcctcgacgccacacgatatgcaaagccttctctgtagcgacatatcaagacctctgccttggagggatcagatgtgatagtacctccgccttcctcgataatctccgtgatcgaatctaataagtgtgaaccaatcccaaggtctgtcgaaagcatgacgtgtttcccttcgaacacatcgagctttggccgaggtgtcggtagagtagttggttcggctgtggaagctccaacaatatctcgattctcagtagagcggattggcgcatcggggccagcacgcaggatttctgggttcggcagaatatatgggcgctcgtcgatccgtcgtccaagtttcaggcagtcgtcaaacctggcatatatcaggttaatgtgaccttccagcattctgccatagtaaacccaggagtcttaccagtgcggaagcactatcttgacattcagtttcttgccaagtgctactcgagccttgtctgaatccgtggtcagatcgaccaagtgagtgaccatttgtgttatcctagggctgtagagcccgccttttgccagcacaccaccaatgatcgcatccttatcaccctctgggatatcaccgcatgtaaccacaacatcgttcaagaatagtcgggggtcagggctgtactgtcgcggatttgctagctttcttttgtttagacacgcatgcagccattgcggtttgacgacaggaatcaaagcgtcgttagcagcttcaaatgtcgggaaatcgatggtcgtagatacgagatggctaaattcatgtaacggtggaaaggcggctggcggttcatagatgacggattcaccaccctgctcctcaagagttgtcgcaagctatcgagtatgcgcgtaagagtttagtgtatccaaggatagatcagtcgatgcatacctggtgcgctgtgtcgaggctgaggtctttcgagcatattatacagatcttgcactggtcgaagagctgaagctcctcttcgtgacccaccatggcgggaattgagggtatttactgttttctttcttgttgtatataatgccttgccacaatcacaaaagtaagggtttcagtatcgctggtagactggcacctgagatttgtggtggcggcgttttactacaattatgcgatgcgacgcgccaacgcgccggcacgacacctggtcacgtgcgcgtacagtttaccatctttggtacgagtcgtgcaaatgtaatcaatattcctccctcctgaaacataaccagttcgaagacagtcctgctttgtgactgtgcacaccatcataagggcaatttcggcgacaccgttcatatcttgaaggctatgcttatcccaccatgcagtgtgctccaggaattcgccaaatgtctgttcaagaagtgagaaagatgtcccaaaggtttctgttgtagattacccaaactgtcatatttgctcccagaaaatgtccagaaaatagcgatttagtgcataatgcaagataataaataatgcaaaatgctcggcactgtttctcgggccattctgagttaattacgggaatgcacctcggctcagcgatccagaccacggcaaaagtgccctgggcatacctccgttaccccagaccatagacctccgccttttaaaaagccccaggcgggcccatgatagaccgatactttcccaaatagacaagagacctatgcgatgtcttcacctacacattccgggccttttcgcatcgtcgaccatttggtcgaatgccagcatattcgggaatatcccggggctacggctaacgaacaggaagatgaattatatttggctgtcaagcagtatattcccctagataaccctaatcctcagccaggtgatgtcactatccttgcgacccatgcgaatggttttcccaaggtacaacgtccatgatttcagttgcgtcctttaagtgtagcttgctttcaacgggaacataaagctaatgctgcttactaggaactctatgaaccactctgggaagaactacatgctcggtccaaagccaatggcttccgcatccgaagtatctggatagccgacgttgcgcatcaagggcaaagctatgtaaccaacgaggatgtcttgggcaatgaccgtacgtaacaatgtctcggctgcatgctacgaccaaatcagacagcgaatactatggaactgacactgtgcaccaatagctagttggttcgatcatcccagggacctccttcacctcgtcaacgtaaagcgcaaggagatgcctcgtccgatcgtcggaatcggccatagctttggcggcgcacatctgtcagtcttccgcaaactggattctcgcaactctcattggcagcctctaaccatcacagtgccaaattatgtctgatgcatcctcgactcatccatacacttgtcctacttgaccctgttatccagagacaaacaacacaactagatcccctatcggccgacaagcgaaaacttgccatggccaaaactacccaactatcaacctatcgacgggatatctggccttcgcgcaaggccgctgcggagggtttcagtcgaagtccgttctaccaagcctgggattcccgcgtccttgatcgctggattaagtacggcctgcgtgaacttcccacagctattcaccaacttcccagcgaagcatctaaggacggtgaacaacccgtcaccctaacgacaccccttcaccaagaagtatttaccttctcacgccccaattacgatgggcctccgggcaaagatgtaccggtggatcgggtaacacatcccgacctcgaccccaatcacctgggatctttccccttctaccgtcctgagccatcacgcatattcgcagagatcccacacctccgacctagtgtcatgtacatatttggcggcaaatcggatatgtgtcttcccgagatgatggccgacaagatggccaacactggtgtaggcttaggtggcagcggtggggcagcggctggtcgagttcgcgacgtctatctcaaagagtacggacatctccttgctcaggaagcaccgactgagtgtgccgaagcagctagcaagtggctgggtcaggaactgcggcggtggcgagaggaagaccagagtttccgtgagcagtggagtcgaaagtcgaaagtcgaaaaaataacgattgatccgcgctggaaggagcatgtccccgcccccgtgaggaataagaggggaccttccaagccgaaactgtgaagactggtagacggcccgcagctacacaggagctatgctgtcttcaatgaatatgacgtacgtcgatgaggttcatgtggattatcggatgaacaacataatattgaagaccctaaatcacgctgtgagctgtaacaccatcttcatttttctcatcctgttctctataataagaaggtcctggccaggccaaaaccaatgtctatgaataaacaaaacacaaataccagggtcatagccaagccaccgtagctcctggccacactgctcgcttaaacggagtaaggatatagtatcagtaagaacatttgtagcttaatttgatttcttggccacaccattttcgcccttgtctttggagccaatacggatgatctccggaaagttccagaaatgcggccaccacaggtaatattcctcttgacggttgttcaaacagtggcgcagccaaatgccccaaattatatagaggtacgcaccaatacccgtcataacatgccttaacaacagaacaatgttagcaagcaccatacgagcgaacacctgcagcggtgcagaaaagaaaaagaacaagggcaaggaaaacataccaccagccatgaccttcaaggagcataccccacggaagccccactacccggcgccatccgcggatcttagtgcaaaagtggttatccaagttccagataaagaagccgccgaggaacatgctcagcccataaataaccatgaaccacatagtcttcagaatcttgacatctcgtacattctcgtaatgttgatgctccttcgaaggaatgggcagaccctgtttctcgcgcgctagccggtcctcctcggtagtgtgtcgccatttagggcgaagggttacttccatggtgtacatactccgcaggacgacgacaatggtcaggatagcatatgcattctggtggaagacagggtcctgaaggtagtggtaatagagggtgatgaagacggccagactggtcagcgcaatggctaggaagacacggacgcttgtcggtctcgagtaagaaaaggacgcatagcacatcaaacaagtggtgtagatcatggaaagctcgtcgacaagttgcatgggatctgtcggaagagaacaggttagtaagcccgagttacccaacgctcctcgtagaatgagtagagatctatcacttgcatttcagtgtcgaatggaacaggaaactccccattccaactaggagatagccatagtatgccacttcaaagatcgaatcatgtccattgcgcctacagctgcgtagccctttaattccaagccacataaacagaagatttgtcaaagcgttgacaatttcggcggagtagatggtcgcatagtaatcctatttttatgaaaccattaggagtgagtttaacagaaaacaaagaccaagaaaggatgcgcgcacctcttcgcaccaattcaaggtcgacgtaacgggactccagtagccagccttggaaggcggatatggaaagaagggaatggcaggccactcaggcattacgggcagagaccgactccggctgtccacggatgatggtcaatctctgttgtgacggggtgattatcgggaggagttatagaaaagagggcatgacaggtacaaagaggggaagaaaaaaagaaaagagatgtacaaagggagagtcgtcgactggcgtttgtggagttactttctacctaaattaacttgacatccgttcggttcatccagacccgtgacgtcgattgattacgagtagtcaagcatcgcaggctgtcaatccgattttgcaggaaaccgattggctagcctgtgactccgccaactgccgaatcactgctggggttggtaacattacttggttactgagtgcggcgggcgtaattttgactttgccctagctatggatgcattcggcctcaatacaaatttcaattgaagatccctggatgagacatcaaacgagggtttctaaagtatttccagtcaaatgtcatttcaccaggatctgtgggggagagttcaaggctgggttcgtccaacggtaagtcgtgccccaattggcagaattccatccatatgcctcagtgcatccatggatgggtacatatgtactctttgcatttccaggtggagtcgcaggcctggctgcacccaagacactactccgtacatgggcaccaactaaaaagtctcgtggtcagggatcgcaatccgtttggaataaaagttatgtaagctgatgtactgtatttatgctgtactgcaaactttcctcgaacaaactgatcgctgtattcgagtaccgaaaatacaccgcatgtggccgcccgtaactgtatccggccaatcatggtacattcggaacgaacctctgatgacttcaccaaccgcgatgttcgagaggaaaaatactaccggcaattcctttttctggaacctcacatcgtacctgatctgagtatatgtcagatctcacctctcaaattcttctttacttttcttatatcgcttgagatgtggtctctgccgcccccttcgtgactgtgaccgcattccggtctctcgcaagattctcgtcatctacgaaaaagcggtgtccattgtggatgaactgaatctgctgtgataaccactgcctgatcaatcttagaagtgcatataaacttcaattcgtgaacttccaggctgggcctgtgcataaccttgcaatgtcgaacagcgctgtatatgcagtgccgcaggtgaaaaagacctctgccactacgagtatgttcctttcttttacgacctttttattgtttttctttctttggcccactagagaaaaaattaccattctttctttacggcgaaacaaattgactcctgtctaatctgctggcagcatcaaaaactacctttcatttcgccgccggcctttgctccggcctcagctccgccatcctcctccagccagcagacctcctcaagacccgagtccagcagtctcagaatgccgcacttctaccgacaataaagtccatcatctcttctccaaatggaatccgcggcttatggcgtggaacccttccctccgcactccgcacaggcttcggctcggcgctctatttcaccagtctcaatgccctacgacaaggtttagcgcataccggggtcccggtcgccctttccagcgctagtgcaaacggtaaaggcgtggcatcttcgtctgctcttccaaagctgtcgaactcggccaaccttgctacgggcgcggccgctcgcgttgcggcaggatttgtgatgatgcccgtcaccgttctgaaagtacgctacgagtcgagctactacgcatatggcagtctgtacagcgcagggcgcgatatccttcgcacagaaggtgtgcgaggactttttgctgggtttggggcaaccgctgcacgtgatgccccctacgcagggctctatgttcttttctacgagcagctgaagcggcgcttcgcatcgctggccgactccggaactggtgaccaatcgctaaagtcgtcgtcctcatcgattaactttgtctctggagcattggcggctggccttgctaccgcgatcactaatccgtttgatgcggttaagactcgactgcaacttatgccgaacaagtacggaaacatgatgcgagcggtgaagttgatggttcacgaagatggcgtgcggagcttgttgggcggcttagggttgcgtattaccaggaaagcgctaagttcagcacttgcttggaccgtgtatgaggagctgattcttcgtgccgagaagcactgggcaacaagagactaagtgcttggtgtctgtataaccaataacctatttcgttcttttgctcgagcatttattcgggagtttgggttggatcataaaggagtttgggtatccatcgtggcaatcatcattgtatcatatataggtgcggtcatatcatcaaaatcccaactcatgacgaaaaaaaagaaaaatgaacatcaacacgaaacatttcaggtccaataggtcatcaaagtttacaaaaaagccaatagacaactcagacaccaaatcctaagccatggaaagcagacgcatagaggtatcacttgcgtttcgcaaaacaatttaatgggccgatcatgtaaaaatccatgcgcgccgactggggctcttcttccgcacaaggtacatcttgtccttcttcctgtcgttgaccttcaactccgtcaacgtgttagaggtctgggtaatgagtttgccttcgcgaagtcgccgggtgtgatcgaagagctcttcctggaagtcttctgagatccactgcttaataatgatatagttgctatcgcgctgttgataccagtcagttagcattgcctactttcaaaatatcaatccgtcaagggtactcacgtcatcccagtcccagggcaagtgataggccatcagagtgtcaggcaaaaggtgtctgcggtggacctagtcattcatgttagtttagccagatacagaaagtattggcagttgggtagtataccttaatccaagtcgtccggcggtgttcttccttctcttccttttcactttcttcttcgtcgtccttctccttctcctttcctttcttcttcttctccttctctttctccttatcctttttcttctccttctcttcctccttgccattttctttctcctccttcttcttctttttggtgactatctcttcaatttcttcctccgtataaccgaattcgagcctcagtcgagccctgaattcttcgtcacgtctccgcttcgcttctctttcggcattgatccgccgctcctcgttcaatttccattcctcaacggccgctgccttcatcgcagcttctttacgttctttctcctgtcttgcaagtagggctctcgcctcctcatcccggatctctttcttgatccgctcgcgctcttcctcttcgtcgatcttgcgctgaagttccttgagcttttcctgacggatctgctctttgagtcgttcctgcgcctcctcctcatcgatcctgcgttgaagatccttgagcttctcttcgcgcagcttcgacttgacatcttcatcctccctagctttgcgttgagcttcctcaaactgacgcaacttgtaacgatgttcagctttgcgctgctcctcctcctcttcgattttgtgtcggagctccttgagcttctcttcacgcagtcttgctttgacatcttcatcctccctagctttacgctgagcatcctcaaactgaatcaacttgtaccgatgttctgctttgcgctgctcctcctcctcttcgattttgtgtcggagctccttgagcttctcttcgcgcagttttgatttgacgccgtcttcctccctagcatggcgctgggcttcttcaaattgatgcagtttccagcggcgttccgcttgccgctgttcctcctccatgcgctggctcttttcatacctctcaagcctcctcagtcgctcgctaatctcatcctcataccagtcctcctcctgcttgaggatacggacatcatgggaatcacgagcgtcacgggcttcaagcctatggcgagccaattcccgctccaaacgctctatttcctgctgctgtcttaacagctccagatcctgtcgatggtcgttcttttccagcagtcgctgatcaatcaccaactcataatcccgctcatgttgccgcggcgaagcctctcttggcgtactagcagtgctggcacgaggccgtctatgatgagcacgcaggagggtctcgtcttctgactcgtagggatcaatataagtctcctggtgctggtccttacgggccctgtttgcacttctgttggagcccttattccgcgagtcgttcttgatatcgacgatgacggccggaggtggtgggggacgctcacgagaccgtcgtcgccgggcgcccgtggatgcggagcggtgcagatgcacgtcctgcacgacgggactcaggtaagtggtgctgccgtgatcggggccgaagcgatgacgggagaaggagcgccttctgacggtcgtccgacggcggtcattctgcatggaataatccgactctgatgagtagtcggactcggaatcggtccatgggacgatgtgttgttgatgacgaggcatcttggtgaagagtatattattatttctttggtcttgtgtcacccctcccccttttttttttttgttatttttcaaatatttctgtgataaacttggcctagttttatcttgtgtttccaataatgatcgttgagatgtggattgtggaagcggggcggttttgtgattcaaaagaggagacacaagaagtgacgtagtgggaagaagcacttggcgaacacaactttccaagaaacagctgtggtgggatgaagaaaccctaagaagaatgacagggattaaaagcaaagcacaaggaggggtaacctctgggagcgaaagaagtaaaaaaaaaaaaaagaaagaaagaaagaaagaaagcaaaaagataagcaaacgcagaagagaagcgaagagaaataagactgagcctcagtgccagagggaaaggaaaaaggaccagcccccgtgcctcgtaaacgcgggcggtccagctgaaaagtgggggacaaaagagaagaaagccgtttattattcgactgtcgtgatcgctgggcaggaatcacccattggactggcagtttggattttggggtcaggctgagcgatgatccgcatcgggtggccacttggtgacttgtatctcctctctgtagaagggttctactgtagatataacaaatgccccatggatgatgaatagctatagatagtacactagaagacatcaaattttcttcgaatcaacctttactagcatctactcctattgactctacctcccaacgatacccaatgaatcattccccgcgcgcctcgacagccctaatttagtccaacttagcccgagcgcaaccaagaaagcactcctgcagcccagcggttatgtgaaacatccctttgacacaggtcgtcttatcaggacccccgtttatccttagtacctactatacatagatattgctactatggtacatagatagtccaaaaaacgagcggtaacggccaccctcaaccaaggaaaacaaggcggctaatcccgcggaaccagaactttctttgatcatccatcgatcgatcttctgataaattggtggcgcgcgcgtgacgggtggatgatggatgttcttttgccttctgttgcttttctgtggaataaattcgatcaaatatgttgatcatttgcatttgctgcctgatgcacatgacgtcggtggatgtcatgtagatgaaggaaaagtcagtgactgtcagccttgtgtctggtggggaaccttcgagtatctagtgcgaattagtactagtgaggggtttgggtaagttatcagggattagtaggcttatttttggtggactacgtactccaaaatagagctgaaacgtcttctactgcctctgtattagtatatactagaaggtttgtacctgcttgggtgtgtatgcactcaggtattctccggagacgaggacttttattattggactactgctttggtcctgtgtgtacctacggacgcttagtactttggatcaccgtaatcaaagcaagttgatgactttctcgcccttgtaggatgaagccttttaaacatcaagaaatctggatttctgtcattgattaaagtttcattgtatcggagtactatacatttacaagttactacgtcgtggggtgagaattttactatgtacagtacaaggcgcagaaaacgccgcgggcgcagagtggctgctgtggccgcgcctatttgctgcaatgctaagaaaactttatctcaatttgcgagacgcttgccttcctaaagaggtaagaaagtgtgttaatatagtgaatcactatatcgtagacagcactccgtacctcagtagtagataccgccgctccctccagggccgggctcccaacaccttaaccattacctttcatgctttctttgtctttctatcctcacctccctattcccacacaataacaagacccgcatactctatcttaacttgaaaacacagtggatatgaccgccagatagagtttttttgatcattgattcagtagacaaaccatcatacagaagtacatgagttagttccagtccttctaaatctcgagcatcctttactccctcaccattccaatacatattaccccatagcagttatctgccccaaatcaccacaataacaatgacccaatgaccccctccgcgacccagtaccccagcccccaaacaactccaaggccggacaatctacctcatccacctattcccctcccacaagccctctggtccctcgggggcggcacctccaaacccacaaaagcatcaacatagacctacctcccagaaggcccctagccagagaccgacttcggcaacatccataccacactaacaaccaaatgcaactccaccgaccccttctgctaagccatcgtcgacaaaacccaaaagccctaggctgaaaaagggctgttgagcggcttgggtttgtgtttgagggtgtttaggcagcatatggttattgggggtggggatggagatacgccttagttgtagaagttgaggggggagtgggattgtagagggattaagggagaattccatatatatgtacatatatatttgtttcacggtcgtaaaactaatatttacttaggctctgtgtagtatctgaatatgtacctttcgattgagtagctgctgaacacaatgctatcgatcatagatgactctccaagcgttcctttgctccctcctccggccgaaggaaataggagaggaaaaacctcttgcccgccccatcttcaagctgcgtaacccgatgcaaaggcgactgcaggacaccattcgacatcagtttcagaaaattgcctccatagacaatagcacatccaggggcagggggcttaggaaaggcccattcatctgagccggggatattaatctgtagaccgggctactcgtagaacagaaaggtgaatgtcccgctgttggtatgtttgttttcaatcacttccgatgcattggctacgcttggctcagagacaagttttaatccagactcactgggaaggatatcgcgatggtactcattaattgggatgttgagagcattagaaaggcaatcgagcagcatattagccgcgatgtagcaatgttgatgtagcgaattcagcgaagattcagtgactgcgaggacttctgggagagaaagcgagccatcactcatctcatcagatgacatcttttttgtttgttccaaccatcagtctctaccacttatcataagccgctaaatggccccatacttacctcaaaggactcgttagtttcacagaacttatacctgtggggagcatagtcaattgaatgaatagagtaaaaagaagaaggagaaactctcttaccctctatcgctggaagctggctgtcccttgcgaaagtctttcatctttgtttccagagactggtcaaagtatctgtcagaggcggcatatgcatccttgacctcccttagcacaagcttggttccaaatgcatttttaaagtctgggtaaaagaaccccggcgagcaaactgcattgagcaacttattgacttcatctccatagccttcaccagcatcaaactggtccaacttggcaaagtcaatggttgaaatgttgatagaagccatggtgtgactgatggaattccaggtttagacagggtttccgagccgtagagacgtagtaggaacaaatttgaaacctaggaatcattactggctctacgagggaagtgtccttgagtaaagttgttaatatatattcatggataggatagaagcataacggctaagttcacaccgcaattgttccgagtattagagaattaaaaagaaaaaggaaaaaggaatatataataaattgacatcgcatagatgcattgcagtttgcgttagctgagcggggactacgcaggagatgttgtagatggcgaaccactatatagcctgagcccgcgatgtagagatttgcggcccgaagctaagcaatgcgtgcgcaagccactcaacaggtgtcatcatctgcaccttatggagccagaaaaacctcaaatcaggcatactgaaagttaattggtggtggggaacatttgttataggttttttgaagggctttgcatgtacaacaaacagtacaacagataagggagccaaattattagcaaatatgaattttcattgcttttaggatacctggtggaagctaagtttggaagcactgtcgatccaatctataatcggaaatacatcaatacgctcggtagttctgggcctctatctcaatgccgcctaagctccactcctaggatacccgaggaaaagatgatcgatatacacgcgatttcaccatatatctcgattaattaacaatactaaggaacaccagtgtttttttctcttttctttctcagaaacggtcactgcatgccttgatggaacccctttgtcccaagtgaacccctcccaaagttaccagaattccgagaaattctcccaaaacctttggaggatataagctccgagctccctgaaggatgtccgcgagatgggcgacgaactcggaagcaccactatgctgagtgccttgctcactccttgttgcaggcattgcgaaggagtactatgatatcgatatcagtttggtagcattcactaggtacatatcgactcttggcttcattcaatcaaaaaagttgttacgaacgagtaatgttacagcttggctaccggaagcgtatccatttgctgaatgatataggattacaggggtaaaggtgttatcaccgcatgcacaacatacgatgatcatgttttcgaatgatccgaaaacagttcaaatacaaactagagtctgcaatgtgtattgaaggcgttgctgaaagtaacggcataataggggtcttagagcatattctcttccctgtgaatgaaatgtgctagctcaaccttcccgcggtatatgattgcaactcagccaaaggtaccgctgtggacaagccagttccatccgataagtatggagcttcatgagacatacaatcaatacaaatcatacaaagagctggagcaggattatgcggcaaagaaaagtttatcctggcgccctgaagttgcccatggcagagggtgatccggacatacgtgagattcacctgtcgtttctggtatgggccgctagtttaatctactctatgattcatactacaactgaattgattcctgtgcattgacttcgcgcaccgttaacactctctgggtggcatgtggaagcattttcgtgagaacatgcgattgataccagaaccttggtagctgagctgaaagcttgaaaatacctcttacagctcttcagccggtcgggattcccaggatgacaggaactgcccaagaagcaagtagtggagacgtggtacatacacaggacacagtacagtgcagagcctgagatcttgcgggacgatcggcaagatccggcgaacgctagtgatttagtggagccagtacactagtactaaactttataaccgaaccgatccccacctgaatgatccgcccatgagaacttgtctggactctaaaggtctgtacacgtagcgcgcaggattgtcggcaaatctctattcactttatattttacagttacttacaattactgtatttaccttctagctttaacaagctatgagatagggtgtgtcgttgaagctattattctatgcgaactcatctaaggtttcgaaatggccacataaggtagtgtaacttatccgggggtttctaccagtaggacttaagcatcgcagcaattctgcatacctttcggcctcccgcctcctgcctttactcttttgctgccccacgaggtgtagagaaccgctggggcgttgactcggaaattaagaggcggtgaagactcttccttagactaggaaatacattgagcgagtcatatatcatttaaggttcggatccctatcgccgggtccaagactttgatgttttactttctcttgttcccttcctctttatacttattttcaatttcttattttgaatttgtatttttatttttatttttatttcgttttcttttctttttgctgagccctgagcccggcttcattttaatataatgatttgttttctcggattttaaaacatcaacaccacattgagatattaatacagaggctgagaaagtacgcatatagctaccggttcaggaaatggggccattgtcatattgggagtttcgtgacacctggtctgacagcccatggggcgttccagttcgaaatgcgacctctttagattactatcataccctacgaagccttgctatgagtttacgacttttcgaagttcccaggactttgctccccaaactcgccttatctctcttcatttgtttctgtttgctgcttacaaaacgctggagaagacggaaaattgatactacaacatatgcagtaaaggaggcaaagcgcggcaaggcaacatcacaacgacctacatatcgaacgggcgggagccctgttgactatcgatctctgtactacaaactacagaatatcgaagaccaccaagatatactgccaggagctcgggagctgcttctttccctgctttcggacgcaattaattcaacggcgtacgacaaagatcaaggccaagggatatttggaattcgatcatacaccgacgaaaagctcttttcgtttctccagacaagccaccaaggagtagaggactcctatgagaaatacattcaagacaggagggatgggagtccaagggtgctggtatcaaatcgacagcacgccactgaggttctaacacggctcgcaccacttaaattggtagatggagcctggctaggtcacattaatcatatcaacacgcctttcgcacacagacacgtcacgaagcaattatggcagattctctctgaggagcttgggggtggaaaattaagccttcatcatacctacatctataaagagctattgaagggtcttgacgtgaacttaccagaaccgtatgagcgaagttttggcgaagcagtgcccaacacgaacgacatgcggattttcaaagcgggagtagttgcactgctcatttcattattcccgcaagagtttttacctgagatttttgggttcaatctccacttcgaaggacttaattttgaaacgatgactttggcacgcgagctgcgggagctcgagattgatgcacaatattttctacatcacctttccattgataacgcgcattccgggcatgccatgatggcagcatttacagtgtcccaatatctagcgctaattgtgcgtgatgaaggccccaaggctgcaaggattgcttggagacgtgtccaggcaggatatgcgctatctaagcatcttagggatggcattgagtcggtggtagctgcagacgaaggggagattgactaccatgcggagaacaataacagccctggaccgtatgatgagaaagtcgtaaaccttctgattgcgaaagcagcagtggcacagaagattcatactgcatgccccgctagaatcggtggtaaaccattggtcgactggctagataccagtcatatcgtatccgatagcgacaaattggattttcttcgagaattggggaacgctgccccatgggtagtcaaaggcaatccagataagagtaggttgatccgggaagtgcgtcgtggagggaaaatgtttggagctttcacactaaaggaggtgaatttgttagaacgttggataagcaccctggatccccgggcaactagcaatgatgcacaggctgcttactggaggttcactggacgaaagagatttctccaacatccagctatggcgccatctctagacccgttcctgaatttcgattgttctgcataccctgctcttccacttggtgaagattatatccacgaccctctcttactcaatcttggcaagaactggcccaagtttatctccatgtggtttgcccacacctctctcctagaatcgtttgtcgcggttccctctcgtgttgctaccgagttgggcgcagccgttacttgcacccttagggctcagtatggcctcagccctgaagaagatggggtattaggcatggatgagcttcaccacaccgtcagcgccgcccctactcccgatctagtcgatattggactagagatcctgtcttgcaagggtattagccctctaccaggatcattatcggatattctcacacagtgtccgtgtgacttctcatcaaagatgttaagcgcatcagtatatccagtgaggaatggtgagatcctgctaggaatgctattggccttcctgggcttgcagagagctgtgttggagtgtccaggaatgctctccgagacagggaagcaggcgttagaggggattatcgagagggaaatcaccggtttaaagacatgtcgtgatttgttggcagcggataaaaggaaagcccagttatttgccgcgggatattggatggcaagaaaggagatttataggaaattaggtcaatagccttctacttattcaagactaggcagtagtagcgcctggccagaaaattattcccattgcatacacctgttcgctcctgtaaggatcgaagtgacactgggacataatattgtctcttcatattcaccggcaacagcagcaaacgcaagaattgagaacaacccatgagaaacaaagtcaactgttttccttgaaccgcagtcaatatatattgctgaaaagagtattgtatcgcaatggttgcagcaagctttgcatgtataccattgataattaagccctaatataccttacccctcatggctttacctctgatggactctcatgtttcgcccgatgtttagacataaaaggaactcacgttcctgaaggtcagcctcacatcgaggtcgagaaaagaagaatgagaagcagaaaatggaggaatccacgtccacattcaaggatatcgagttccaggaatacatttatacacgtccagaactctatacaatgtcgacttgaactacgacttaaagtataagcggtagatagaataggagaagatgtatctactagtacttttaacttttaagtgggtatacccactaaatacctgtatgtaaccatgtacatacagtactacaaaacatcatacacgcttattagttccaattatagatgccactgtggctgggagtctggagagctctgccatacaatacgaagagtatgttagtactcgcttgattcttgacgctaatgtttaactgctccgacaccgagatgattcaacattttaatcccgatactatcgaagtctctcaatagcatgtcaactgtaactttccctaagcgttagcatgcgtgccccgatactacctgagttactttaaaaactgtactctactagtaactatgcccaacagtgttataagggcattaactagaaacctttatcgacaatgaagttgacattcgtttcacgttcttgtctatccattggaacgtggaactagaagcacttggttttatgggagggctgaaatgattctatgattgacatacaaactaggtgaccgtagttaacaacgatcatgaccattcgacaaacgtttcctttagccatgtgggccctgcagaagtaagtgtccaggtagccatatcagtcatcttagtgatcacaagattcgcgttatttattctaagtaatcgttattgatattttgttgctaagaccataatataatagtgttggagctgatctctgggtcccttaagagtaatgtactatcgttccctaagattggcaatagtagatagccattctacagtaatgtcggcctcctcttgggctgcgacatatcatcatcctggttgcttgcctctttcgccagtgcatcctcaagtaagagttcgtccttcctcttagtagcaggccaattggcattgccatttgaagcgttaagttttgcctcatcaagccacacattccacaccatcgtttgaggaataagacctccttttctgacccagtcaatttctttggtggctctaatagcaagccaaatagcctcagtataattttccgtgatgatagtagatttgtctactaccctaaccagccgcatattccaatgccatgtccgactgactgcaggcgttagagcacagaacatatagatgacattcagtgccaggtaggaagcaccgagagtgacctgcatggtccaggaacaattagacatcaatacaatgcccagcattaaaagcaaggtgcccacgtaaataaggattctatacagcttggctcccgccacataagcacattttacttcgcccgtatatagtagcctcgcgactgcttctttgcaatgtaccacaatgaaagccccttctcgagttcgaagaacaaggtcaccggggggcgaccgtgtcgagctgggcctaactattgcatcggactgccaaaatgaggcagcactgtgaaaactgctggcaagagataccagaacaattgcaacaactgcggggccatcacgaagcacgattgcccaggccaaaacaccagccgtccaaacagaactgcagattgtgattaatttcaggggtgccaatttcttaactgtcgctattttatcgtggccgggacggagaacttcctcgtcgtcttgacacagctcaatcgtcattttttggaattcgtagggtcgagtcagctcgagctggtggatcatgctagggaaataaggaatactttgtaactgaatccctgagtagacgccatgaacggtgacaggagtcgacggaagtgccgttcggcgagaaggtcgaattagtgcatgtggcgccggcagcagccttggaagtaaaattgttggtgaagcagttaggggttgaacaacctcctcaatgatagactctccaatgatggcgagaagaccgacaaggtcaaatttccaatcggtgcgagtctccgggaagatcaatcccatgttgaccatatacactgaacagaaacgatttcagaagctttaaacgcagagtgttgcagtcacaactcagtcctggaaagtggtgtaccttgctctattgtattttaaggtccagctgctgaagtgtgggatggagttgggccttggctgcacgatagcaaatcgagcattccattggtagatcacttatgtacagtgttcaaaagtatttatttgcaagtgccgatcgctaatttccactccaatcacacggcatagcgaccatgttgcaatgtatacgaagtacggagtactctgatctgtctcggtgggtttattagattggtcatatgtccgggatcggcatcctacgcaattcttcctgtgttaagtataatttaacttatcttagagtctagtatggcctctcctgcatggtattaaagaggcctttcaaaaatgtctctgaaactgcacccaaggccctcgcttacagtagctcgaatgtgatcataagagagctggcgatctttaggatattgatctttgaattcagttcttcgttcagccccaaatagcctcaatcgcatgtctctggtacaagaattccgtatattttcgtacgcacctgaggtcaatagtcgtcaaaggcagggcaggggcaattagtaacagcaggttcaaaattgtcatacctgggtggaattaacaaaccatgcttctaccaattaacgcgcatgcagattgagttttacccccttttttttttttttttgtttttcactctcagcaagatgccttacaaaaagccatgacaatgatcacagtgatgtttagaggattggaggtgctgttcgaaagagttcttttttcagcagcaaaggaccgctagaaagctttgtggtaatatccgactcgataaaataagaaactggagaagagcaaagggttacaatgcgtaatctgatttgcctctagtaaactctgtttaaaggtcacacccacgtatcatcgcacctgaagacgagatgcagaagagcgatggagacattgatctgtgaggatattattaacattggtttctacctagtgatcagaagcaacagaggataatcaagtattaaggcatgcaccgagtttggattcccgaggtaaacatgactagcgaccagtgacactcgctagtcatcagagtagccgatcgctgtctcagcgactggtccagccagtaggtctcagagccaaagttccgtacgctatctggaaaccgttgtatatccaagcggtgaagcgtgttctgcacagtaacaggcttgcatgagtaacagtataactcgctgtcctcatccttcatcctgaacatccccttcttggtcctgttaaagagcgcttcgtcggttccccgttctgtttctcaaaaacgcccggctcggcgaagccaaatgttcccaaagccagaatagactcacgacaaaccccaacatggcttcagtgccatatgcggattaactcaagccttaccaccggacttcacaaaccgctcataatgctccatactgttcttatgtgtcatctccagcgaactcaacttcttttccaaccccgacacatccgacttgagttccgccttctcggccaccaagcgtttatcaaccgtcgacatcgggacgcccacgaacctataccaagtcaaagtcagcgccaggtctttctcttccaatgtcgaattcaagcgaagcatatatcgtcaaagatggaagcccactcacatcttccctacaccttcgtagacaggtgtgtccttaggcaatgagctcatctcactagacgtcaagtctagcagtctgatagccttctgttttgtggtcacttgggccttggcgatcccgatctgttgttgggaggtaactatacgattttcaagttcttgaaggagctagacatcgcattctgccattagctaatggtcttatcgatgtgctaggtgttcaataagctaccttttgcagagcttcatttggtagagacattttgacacggtagagggggttatgaggggtctggtgaggggatgcaagtcgccgtcgcgggatatttaagaaagtgggagattgtaatttgcgatagataggtattcgcaattggtagcaaagtgcgagctagaagtttgttcgactcgcgcaaggtttatgatatttgttattgtatagaggcaagacggaggctcggggatgaacttatcggcggccaagctcagttgactccgctgtccgcccggcggggcgttttccatatacgggtgttacttagggcttagggcttccacactatatatacaagctgaactggcacttttcaatagtttgagttggtcggaggtggtatcctgcgaagaaatcctggtgtatgcaattgggttgtgcgtgttatacaaattcaatcacatgcgaagattgctacccaatatcaatctctcagctcatttccaataaagcgaactgccaatctcctaatgatgtagacgaagtacaaatatgagcgattgtggctccgttgtgcttagtacatcatagaggctcgcatcttgttatactctgcctgtgtaattggcttgtacttggcgggctgatcctcgctcatacacgatggaatacattcaattacagatgttgggtctggagatatgaagtaggggatcgagaaccgctcgcgggtcatccgatctgggccctcatagcgatcggcgagtggtggcattctgaccctgtggtttgtagacctgagttggtctgttggggttagaccatgcatcgtcgcattttgccaagttggataatgcacttaccattactccacatttgaagaaggtcaccaacatttaccactatggcattctttaaaggagttgcaggaacgaatgtacctggccgagaaacatcttcaacctccagacccccgcaatcgtcttgaaacagcatagttaaggaactccaatccgtatgtgctggacaacgggttgtccgctctttctcaagatcttcagctggaacgggcaagtagtgtagtagtcgtagttgattaccatggcctgaatgtttgtcaactaggtaagaatcgtcctctagattcaatccaatggctagagcacgtaaaagctcctcgccgactgcccagcactcccaataaaatttgatcataaaagtcctgaagcccgggagggcttcgtcgggtatccattgattgggttgttcagtgttttcatcactcccgatatcgtatacttcctacagcactgtaagatacgggcctttttgatattattctaatgcatgactttggtacttatagtaggcaagccacaacatactttgacatctgggacctctcgcaactttctttttgcctcttcatcattcccggtggacatcgtctgggatactttctccaatccaggccatgagtaacctcgatgcactgcccaaccttcaggatggggtgctctcattttctcctcttcaggaagattgaaaaggcgtttcacccaatcaaatgcttcatccaggacagatttgggcagcgagtggttgatgatgtagacaaagcccacggtttggcaggctttgacgagctcatgtgcagttcttagccgagaagcttcgtcctgggtattcttccaggatgagaagtcaacgacaggtattgccattgaggctgaaccatttcctggcggcatgctagcgggcgatagattatagaagtctattcgatgactaaacttcgatgtgcactaaataacagcgtaaagacgttattcgtctcgtgttgttagctttgttggcaatatatggattgtctatagatatggtggagacggtgctagagtttagatgtgatgacattcccctcagtcacatgccatcaaccactgatgcttcctgttttacaatctctttactccccacaaccatgtatgctcatattgagcccgaaaactacatgatcaagcttcgcttaaaattaagcaagcactggcaatggttcagaaggtgtgatcattcctggttgttgaattcaagatgtcctacgagcaattactcagaaagctgttaattcgtaaggtagagtatccaatttgatcttgaattccatgacttcccccccccccccccccccccccccaaatgtgagctcgggacttactctcaggcaaattaactgagcgcaatataaccttgattggacgttgcgcaggccattgtgaatgtgcactgaatgcatctatctcgtcgccacattcgaacaatacttcaaagatgggcgatgtgctgtgttaaagcaaattcatgccagtgcgacatcgcagcaaatactaaaatcgctgatttccaatgttttcgcccgcagcaaacgtcctagatgatttgttataccgtgaagtggggggcgtctggttctttcgggggaggattgactgcgattcgcagtccaagtttagtcactatcattctcagcaagctatttctcctcctattcttaggctctagtgttgggacaaaacagtttcttttgggaaaaaaggtactgatctggttgccttccttgctgccttgcctgttgcctcgttgccctcgatcatgcgtgcgggcacccggttgagagaagctttcttccagtctagtataaatctagctaatgtagctatgtatagatcggtgtacctgttggacatcgaatggctcattgaatcaatggcaattgattcgctgattggttgttgtgttctccttccgtggcctcaaatactaagggacggtaaaacctcgagcctatcctttccagaagtatattattcgcctctagcgcagttagcaaaatacgtactatgacgaatttgcagcgactggtcttctcgggcctgaatgttagcttgatttgaaggatcttcctagctttggagaggatggctgacgaaagtacgtgtcgggatttctctcgtattgatttgtacaatcctcgatagaacatttgcttatattgagtgttgcagccttttaagcacttacaccatccagcgttggcaaaaggtattgaaatcaaataattcaacactgaaatagatcctctctctatttatacatacccattcatcgacctaagtaatcatcgaaatggtcgatacgtgtccactcacgcactgccctcatacgaccggcaacattggaatggttctattcatctaagtagtatcgtagacggatcagacgggagttccgacggagaccggattgcatgctcgaccaagatacgggcttccaaagtggcccggtcgggtgtggtgtttggtcggatttcgtaccttttaaagccgcctgtccgggaaacccatgaggatatggtatattgaaaatatggtatagagggtttctgttaagaataagtagcaactttctacattggcaggtcaacgcttagagacaactttacatgctgttgtaatatagccactttccgagggtaggaaagtcgtatcaagagctacatgacgtagaaagtttagtaagagggagaatgggagagtatgcattgtctgagagttcatttaagagatcaaccttaaaagttagttagactaacaatatgtaaaaaaaaaaatccttttacccgattacatgtctctttttcattttccccttccctttccacggatgaaactcgggaggaaacagtggtaaagctgtacgagatgcagcggagtttgttttatcgagaaatgcagcttgatgtcaaaggtttatattaatagctgggcaggtggttggacaatgggtggacacgcggttgctgtggcagggatctcggtggagattgcgcctaactgccagaacaagtacagcccgatgcagaatacatcatccacccgactccggtcaccggtaccgtggccgaccgttctcgaagatatctggagctggaatttagccactgagtgtgagttgtattctcatacatacccgtcaatttggatgttgctttgtctcgagtcttgcaaccacccactaacactacggttgccgctttcagtagtttgttgaccgcatggtgttattactgtcgcataccacacaacgctcaatcccaccaagaattccaatcgaaattcaagctgaacgccgatctcgagatttatatacaattcagtgggcggactctagccctagccgctagaatgaaggtatttgggtggatctcggccgcattcttcgcctcgactgtgttatcgatagagacgttgccattttctcctccgcaatccgcagaagcaaacaagagggcatatgaggtcttacgcatattaaagcgggctgacagctgcccggctgggtatgacccatgctccaacatgggtagatccgacgtctgctgcagacaaggttccgtttgctctcgtgacgccgccgacaatattgcctgctgtccgactggagcgaaatgtacaggctcacttaccggagactccacttctgcctcgaccagcttcaggtttccaggaaccgcaactgtttctatgaccaccacgggacccaatgatgctactattactggctcgacgatgccaggcgcttatccgttcgtctatgtcccgacgacgttcccgaacgccggcgtctgttcctcatactactccctgtgtcagagtgagtataccggttgtctttcgagtctgggaggaggctatgcagtcacggtggcagctgagggtggaggtgtaacccgagctggcggaggggcagccggggcagtctctacctgttctagcttgagcatgaatgcctgccatggcctcaatctgggctactgcgacacgtatgctaccggaaccggagacatgaacagggcacccccgggacggacctctagtctggaggacctcgtgtttggcgtggtcattggcgtggccggtatgtttatttgatcagccttaatgctcttacgtttctttatggtggatatgcgatatgaaaacatttctttgttctttctcttttacctatatgttacaacagattgatctcctggatgttaaacgaacgggacgtctttcgcgcacatactgtatggaagcttatggctggactcttacctgacttggccccgtatacttttctttcagaaggatgaaggatgattgaatgatgttatggtcgagtgctatgctaagatgtaaatctactgttctttggcgtctacgtatgtacatatctagctaggatttggggatacgagatcccaacattactgtctgaaccatataagaatatattgatgatcggaaatggattaacctgatactctgtaccaggcaccgaaacatgcacaaagaggacatacagaatactggcagataccaaggcatcacaccgcttcattgtcataaatagtgtacccaataccttggaatacacatcgtacatttgcgagcgctaatttcatgcatgagtaactagactggaaaaaagactagtctggaccacagtatcggataatctcccaccggtgtgcgttgtccctgattcatccgcttcgctggcaaggcactagagcgtgacgagacaacacacaggcacagatggagtaggagtatggagtagtttaaccttcggattgacgacgacagactcggcgtggggccaccagagtagacacctcaggtgtgattctatagatcgatctatcgaatggaagtgggggattctcgcacaccgactcgagttactcaacgcgcgatttagttcaggttccgtctttgttccgctggtaataatggggaattagtatgaaactgatgtcagggacggaaggtaaaaaagggtcagcaagagcaatgattgcttgagtcatgtctctgccgtttctccaatacagtgaggggcacagcgtccaatgcattgcgacgataagatgaaagacaagggaaaagctcggctctcccagccccctcttttcaatgaaggaaaaattagaaattcctatcaatgagtaaactttgatgtcagtacctcatttgagctttttttttttcttgtctagaggtcgctgcgattggctgttgctgttgttttgttgcaggaaatcccggtggttgggtactatacgggaggctgggaaacagggcttcaaagcaaagctgacggtcacttaccgtctcttggtcaccacgaggattgcccccctcatccaccccctcattcttttttcttcaaaattcttctgtcactgtttgcttgtcatgcttgctttgacattctttctgacgtggttacgaaattgaagatagctgtctttcgttttcaagctcttatcgataccgacccatacatagtccgaggtgaccggtctagtcagtttgaataagattatcgacagtgctcgtggtttatcggacctggagagggacagaacgagtttggcattcttctcgtgatcccagcacatatctctgtccaccatgcacacttctcgcatattacactcagccatatccatactgactttattggcgcaagttcagcgctccgctgcttcccctctggattttgatgaggccggccttgaaaagcgctgcgcaaattcctgtggctattatggccaactctgctgcagctctggtcagacgtgtagcaccgatagcaatggccaggcagtctgtgcagattcctccggtggcagctggcaatacttcactacaactttcgtcaccacggaaaccgatgtcgcgacagttacctctacatggagcagctatgtaggacagactacgactgctggaggtggctcggggagttgcaaggccgagctgggcgaaaccatttgcggaaacacctgttgtggtgcggcgtacgtctgttccaacaaccagtgtgtgatgggcagttcatcaatctgggccaccgctaccgctacgcctccagtacgaggcacaagtgcatctacaatcactgcgactgcatcggcgacaaccacacagggctttgttgctcctgttggcaccgacggagcccaactcattggtgaaaaagcaccagataatggaggactaagcggtggagcaatcgcaggtatcgtcatcggaacaatcgctggcgtctttcttctcttgcttctttgcgcttgcctgtgctgtcgcggagctctggaggctttgtttgcttgcctgggtcttggtggtggtagaagaagaagaaaggagaccacatatgtggaagatcggtattcccaccatacgcatggtggcaggcctgaaggacgtacctggttcggttcgcgtccgtcagctccaccaccccagactagtgaaaagaagaaatggggcgggctggcaacccttgggatcatgttgggcgcgcttgctctatgtctgggattgaagaggcgcagagaccacgaggatgaaaagagcgactacacttacccgagttcatactactactcagattattacaccagcacaagtatgtgtcctcttcttttggtatttatagatgtataacccttactgactgctctataggtagcgcaagctcggatcggcgaacgagacggacaagggacactagacaatccaggcgatctcgcacgcgttcacgacgatcatgattaacgaagtgatacaatgaagatctatcaacgagtcgcataagaccatgaacctgtttatgactttctgttttcttctttccccatttctttttgattctccgtcaagcatagaatggcgccggtttggtattttgtgtgttgtttgtatcaccatgcttcttttgccttatttgcgtcaaatcccccgtacaactgttcccccttttctccctttacctttccttatctgaaagtcaatatgtatgatgatgagctatgtatccatgttctaatgacttgtcctatttttttttctttttccccccttgttttccgatatattttgatgggtcaatgaaggaacgatgtaaatacgaaatagttagcgcaatgacaattatgtcatcctgccagagatactgagtaataagatgttttgatcggaatcatttggataggtcaattgcatgtagccgcaggaatcggagtatattgagcttagacccaaaaatatgaacgcaggtccaagactatgagggtgggtaaaatcatgcactttctgcaccataacgacgggtaccgagtacctctgttcgaaactcccgcaatagtgtcctgcacctgccggaagtactcgtgcgacattctgtgtaacatgtaaggcggcgagtccgcagagggacattggtaccttggtcagtattgtatgctatggagacgcttcaggaaaccttattcaattgaagttggagtaagactaagaaattcatgatcggtaaaagagagactgagctggaacggccctaaatattctatcaatattaaaaatacttcaaagggcgctcaattgatggcgcttgagtgacttggacggtttaagcgggccgcgcacgggtttaaagcatcaagtcaatgctcggccggaacttgcgttctccccgcctcccgtagtccggaacttcctcgacttctccatccattgctcacacttcagcacgccaagtcgcacactttcacattcaaccctcaagcaaataacaacgacagaaaactgtcattcatgaatttaatttcgggtacaattccttgactatagaaacctttccctcgacgtctcattccttgtcattccttgtatctctgtcttcggtcgctcagagctgccacgactgtcctcctgaggattacgagtccccgatccttcaccagcccgtcatgctccagacgcagactcagcacgttttttcccatcagcatcaatatcccgctgatccctcctggctgcaacatcaacagcagcagcagcaacagcagcaacaacagcaccatcaagcccagcaccacccacaccaggcacaacaacagcattcttccttggtggcccaacagcatgcccaagtgcaggccgctgcggctgccgccgccgccgcccagcaacaacactataatcgcatagctatggccggcaaccctgctgctggaaacccagcacagggtgcaggtgctggagggttaagcggggatggcgctctcccgggcgcggtatcggtgatggatggcgggatcagtgatgagaaccgcaaggttttcatctgggttgctgagcttctagatccaaaccgcagagaagctgccctcatggaactaagtaaaaagcgagagcaagttcctgagttggcgcttgtcatttggcattcgtttggtatgaactgtttcctgtatgtggcgactacttcatggatgctaacgagttggtctttgtaggcgttatgactgccttgcttcaggaaatcatttctgtataccccttattgaacccctctcagttaaccgccgcggcttcaaatcgagtctgcaacgcactggctctgttgcaatgtgtcgcctcccacaatgagacccgcacactatttctgaatggtatgtagcagttcatgcttgcttacaatacttgttggctgacgcaaatactcccccagctcatatcccactttttctttatcccttcctgaatacgacctccaaatctcgcccgttcgaataccttcgcctcacctctcttggtgtgatcggagcgttggtcaagaatgactcttctgatgtcatcaacttccttctcacaaccgagattatccccctctgcctccgtatcatggaaaccggttcggagctgagcaaaacagttgctatctttatcgttcaaaaaatcctgcttgatgatattggtcttgcatatatttgtgcgacatacgagagattctatgctgtggggactgttctgagcaacatggtcacccagctcgtggagcagcagaccgtaaggcttctgaagcacgttgtgcgctgtttccttcggtaagttttaggccacatatgattaacggctggacaacaccttgcgtttgtgaatatttcctaactatctgtagcctgagtgataacagcagagcgcgtgaggccttgcgccaatgccttcccgagcctttgcgagacgccaccttctcctccgtcctccgcgatgatgcagctacgaaacgttgtctcgcacagcttcttatcaatctttccgataatgtctccgatggcgctccgggtgttgctatgtaaaagtcgaaaaagcattgcttccgttttgaattacttggtatatttgacaaccttacgatatgcatgggacggtctaaggcgaatctgggtcatgtggcgcaaatgtgtgaaaatggcaaaataacggtataaccaagaagaaagaaaaaagattgggagaggagcaccgggttggggatttatgtgaccactatgtaacaaagtttgtccttttttttttgtttcctgtcgcatattttttttttttttttttttttttttttgtctttcgcatggggtctgcggtttttcctcctttatcccatttcggtcataatggtacaggcttgtgtggtggcgtggatatggatggcgctgtcttttctgtgcattctgcttgtccttgacgatccctttcctcatttcccatttgaatgagatagaccctctttgagcgagataccagaatctaggttttgattcatgcgttgggattgcatgtacgggtggaagacgttctggtctgcaaattctgaggcacggtttgtctttatttcttactgtcgttaattaagtaggacattaccttgcatatacttggttttatataaatttaataagaatttgagtaccggggactatcctcgactccttacgtggtagtgatctcagagagcactttatcggagagctcgctaacactggaaatcacctgacaggcggaggtctcgacgcgccccgtgagctcatctccatctcgaagacacgcccgccctggcaaatcccgccctgtgttccgccactacgtctgaatagtttgactcgattgaaatttaacctctgataattttctcgtgtatacacatctaacctcctgcttacaagaaaacaaataccgcttgacagctaaaccgtgattttcgaaattcggttctgcgctgcggcgctgttcatgcgctcgaaccgccgacatggtatcgcgaaagcgcacccgttccgaggtagacgctgctccggagcagccacctgaggagtctggtttgctgcaccgactgcggaattgctgggagtttgcaaatctcatgcagtatatagcgatctttggcaaacctatgaagattgatgaggagtttggaattgaagtatgccatcttgccgaactaggatctatgaaatagcctctttcgcccttctttaacttgcttgtcgcgtgtagtagaagctaacctcttcgtttcacactatttcacaggacttagagaaagaatgcttaaaacctggttcttctgaaaaactcctggagattggactctgtcttctgaaatggatctcgtcgcatcggggcctcacgtacgtgataaggccttgagccccttgaacttccacgaagcgctaacacgagcggttacccttagtttcgacaattttgacgaatacacgcgacgtcaatataatgccaaagcacctcatctccctaatccgttcgggcacgatgaggttcctaataagttttccgagttcgatgtcttcctgaagcttcgcgtccttcatcagttgaccatatggacgttttggaatccggatcgcatccgtgataagatgccggagcaaagggaggcggatcaaacgcaatgggtgagtactgctcggaatggtatcgtgccttacgcttgttactgatgtcatgttagcgcattgaggaactaggttacgatcgcgaagggcgctactattatatcctagatgacaaccgactctatcgtcgtactgatcctcctcctccccctcctccgaaacctgccaaatcgaagacgaagagaaagagtgcacgtgctgttcgagcgtcaaaacgcagaaaggtatcaggagccgctgctgcggaggaatcctcgggcgaggaaaataataacatcaatggagaagtcactggggatccttacgaggggatgaaatgggagtgcattgcaatcacgttacaagactatcaccagtttctggattcgattcggaaaacgaaagaccctgacgagaagatcttgagggatcgcattgaagagcaagtgttgcctgtgatcgagaaggaagaggaggcacaggagcgacagaaggccaaacgtgaaaaagagctcatgaacttacagctgctcgcgggtgcaaaacgatcaagccggcttgctggaaaagctgagaaggagcgacaggatcgagaagctgccgaggcggcacggaaacgagaagaagagctagcggctgctcttaaggaagaagagaggattaagaagatggaaaaagaaagacgatcgcgcattatgactcgcgagcaacgtatcaaggatcgggaacgaaagcgtattctacacgaaagtgagctagagcggatagcggaggaacagaagaaactcgaacggggcgaaagcagaatctctgaaagacagttgaaggccgaactggaaaaacagagaaagaatctggaggatctttctcaggaagacgaatggatattcgattgttctgggtgcggtatgcacggagagaacttggtatgtcggcgccgtcccatatactaaggcaccttcactgaccctgcataggatgacggcgagcatagcgttgcatgtgagaagtgcaatgtatggcagcacagcaagtgtcttggtatctcgcaacaagaggccgagcgtgacgatttccatcttatctgccaagattgtaaacggcgagaagaggaggcaaaaaggccgaaaatcccgccattgaagtttcgtgtcggctcctcaccgtcttctgcggctgctgaagctgatcaggaaggcaagggcgtggagactgcacacacttctgtgccattgaccgtgcctccaaacgggtcaccatctaaattgcctacaatgcaaccatctcttccttcccacagcaaagcccaacctgcccctatgtcacccgagcgccgcccgcagtctgcccacaccgtgtcactcggcagtccccgagctctcttttctccatcgaagggtgccaatggttattcgccctctagggaagcacctccgaagctaccatcaatccaacaagcaacacacctgcctcccaacggccgtgtttcttttaacggtggctctttccactctttccattcacaacggccgtcatcctcccactccactcaaagcccgacatttccctcacctatccagaaccgtccctcaatgtctcctacccagggcaaccgtgatgttggaccccttgccgggtttccacctgcaccaccatcagacaactcaggcccatggacaccttacaggcaacaccaggccccacgccgaggcagtggtcactacgcttccttctcttcaatccctggtggacacccatcctttgcagctacgcccaatgctagtcactcgtcccctccacaaagttcacatggcggtgttgcactttcagggatcagccccaccaagcaatcacctcgccccgttacttctgggagtatgacgggtgcgccaatcttgcctcctatacagaaacttgagccgagtcccaagttgatgggacgcagttcgcctgatgctcccattccgccacccgtaaagtgcatgactcctgagcaagaggagcgcagacagcgcgaaaacgctctgatgcttcatgcccagtcccatgctcccaatggtcaacattcggccatgtcatctccatcgcttaaccggataccgcctctgggaccatctgcactgtcgcaaagacatgaatcaacggttcaatccgaatctggtcccaagacggaggggcaatagagcaactggtttggccgctatgcgtagatgctttactcttgcaatattccttagttttcagcctaacgcaatcgctggggatttttggctcttcgtggagcgtttatatctggagatatatcgctaggtcaattgagggaggctcagtcacgtcggttgacgtctattttgggttattggatttactggatctcgatcggcaaggttacacggtcagtgcaggagaattttgtgtgatggcgaatgtcgtgaccggagaatatatccccagcaattgcggtcggcaccggcagagtacacaagacctctggaattacatgtccatattctgcaggacattgcccgcaacatgacacagttgggatggcaaccaaatcttctggatcacattatctattaccctggaatgaatttcaggcatcgttggcttccgtctgcacgtcatgtgtcgataaactatctattttacttttcccttcttacagaggtattaatacttacataacggatcgggaacgagacggtgctctttttatcaaaactactacgaaaacacaaaccgggatgggtggtcaggcgttatgccatacatagagggagaactgttcgcagcatatgagttattttctaggggcgggtgacatgggtgatctcacacgggtcaaggaaaagtaatttgcatgatattagacacctactatagaatagtagaatactatgaaattgtacactagatccgttcgtcttccctttaggctaatcttaaagaaacaataacaatagaaaggacccaggggaaagacgagggtaagaatccgttggcctaagtacatcaacagacgggagaaatcaaccgaagtatcaatcacattgtgatagtccacgacctggtttagcttcggcatatgcagccatctaatacgccagtggcatccagcctatcccgcgattcatataaacaaccttgcatcaggcagagatccagatcaggtattagaatcaaaattctaatcccgacgcccgcattgagattacgaccaggtgaccaaagtacgtgtgtacatatacatccctatcttgtacgtccataatcttgtatgtagtgtactgtgtactatgtatgtacctacaaacgagcgcaataatcaagcactcagtcaagcaaacagatcaacctaactagatcctataccctgtaaaacaaacgccattcatgattcaaacaaacaatcaatcaattcaagcctccccccaataacacgaaaacgagaatgaactataacccccccccccccccccccccccgggacaataagcatagaacaaaacgttagacttaatagcaaccaacccgctaagcctcgcccaccgtggagtaggtaagaaacaaaccccccaaaaaaagaagaaaaaaaaagaaccacaccccatcacagacaatactttcccataaaccgaaatggacagaatacggtagatattccaaatcccgataaaatccaaaaggctaatcaatcatcctcaaaattgattgtagttgttacaaaaatatcacgagtcagtgttcgtaacttcaagtctgctccactagcggctcgcaacatagcacccttaatacttaatgtggatattataattgtagaagggggaaagagaactatcttgccttagggctgcccaatgaagtgatgttattgacttgagggtgcgatttgactggcggggaatgagagaggactggaatgggaatttggaaacttagtacctagtgtaaatggagtttgttatgcaaaatttggattggagttcgttgatcggggtcttggctgttggagggggatgtgtttatttctggtacgggttggatacacctatgtagtataggttcagttggtacctccgaggaggtatgttcatctcagggctcaagggctcaagtgcccgaatcaggaaacgtggggctccgggtcacggtgcccgtctcgatggcttaaccacaacgggaaagccggagacagggaatatcgctgattggacccgtaagctcacccgctgaatcagcgctatgaactttaacaactggacggtatcggaggcagcggatggatcttcttcatgggtttgggtttggattcgaagagcggcagcctttttggctcacggacatgctcggaggatgtactcttcatgggaaatctagatgtttggggaaattgggggcgtgggttattgggaggtaccgtatatcggagtcggagccggacttaaggtgtgtctcgatcgtgatcggaacaacgggcgttgttcctgatcgtggatcatgatccttcgggaatttggtgcctaattgtttcttggtgcgtcggcttcgggaaagggatgacaaatcatcttttattatgaacttcgttcccccgtattctaccaaaagttgaatgaggggcattgaatcagtactattagataccttaacttaaggaaggtagttaactatgtggatgtcttgtagcttaatggactgtgttcgacttggcatgttttgcttttctttcttttctttttcctattatgtttagaggaggcacattgagaacgtgctcagcaaggggcgcggggggtaaggcgcaaaaaacaagatcaagacaccaaacgctagcgatgcacgtctgctgggccacccttggaaaaactattttagattcagttgtctcgtacgggccggggatatccgtatggacacagtcattgccaagcgaagttccatatgtatagggattagtttgtcttgatatggtatgaggggtgtctcgaaggttaacagctaacagcagcacaaatggttgcgtcagatgtctgttcctcccccgatgccggagttagtattccggttcgatgctgggcaacgtcttgtcaggttctatttttctcagatatggagggtgtggagttgagcgtaacgaaagtggagaaaaatttagagacggagtatactacggttacaagacaactgggaagttaatatcagatagcttaatcaggttagtggagggcttgagaagatcacgttggaggggagtgacgttggcatagggcataataccacatgctatcgaccaactacttgtgatgggctgtcactttctcagcccaccgttaacggggtcacagatgctgtcagcgcttaattttaatgttcccgcgattatcggtgtcatatcccgcttggtccgctttttttgcgggtttcattggaccaaatcgacattttaaagtatggaacccgatatagtccggccactcaggggcggtgctgccgttagggtctggaatttccgtgtggacaggtatcataggtatgtggctttccttttttttttacttttttttccccccacggcgtctctcatgtgctgctcaaaggggtaattattagctatagcactgtatgttagagcaatatgttgatcgcggtatagatagggatgaggtccgatttctctactatgacagaccggcatattagcactcgttataaagaaatagttaaaacttagaggctcaacactatgcagcttatacaaaccttcattgataagctgatcccacactcagaggattcttgttgatgcctctatatcttgccactgagcacggcggactcctaagggaaactcatgggcgaagtgtacgccactgagcggaactggtgttgatgtcttccgcaatagccgcggaacttggcctgggactaattagcccagaagagggtgacatcccatccccccaggctgcaaatgagagcgtcagctactctaacttggtgggttatggatatgcgttcgatgtaaccaactagcggcatggaccgctcaccacatgggtcagatagcgatacaggcttagtactccgtaggaggaagcaacttttccctaaacttggctatattacgtgaattagcttaacttgtcttatctgccgcccctgtccaggtactgatcttaactaggcccatatctggtcctatacattgcctggggtagtgcctcctcctctactagtaagtaggaggcaaaggttggaatagtcgctattccgcgagaagacctgttcctaagaaggtatcggccacctgctactatggcgaacgggctccagttgtatacctgaggtcgccgaacatttgaacatcatggaccaaagtagtaggtaaggtaccttggactcgctctgtacgtagaaactatcaagtggatcctcagtcatatagccaatcggtaaacgccgtacgcgacacgcagaccaattgcaaaacgcggcagaaacagacaagcgctcgccattgagagggcgtatcggtcgtgccatatcatgaatttggcccaataaaagactctcggtggagtcgaaaagggcaggtgatcgatatggtcgacagggatgttacttattatggtttaagcaactcacccaaatcgaggttactttagggtacctcgtcctggagactctggttcagtggtggatcgtaatgacaataccagtggggtatgggatccacctgtaccagtgttcgactttgcgcgaatccctgcgtcagtgctcatgcccattcgcaaggtctagactgtgcgttcttgattagggtctgaacatattgatatactggcctgggcgtatctgtattgtatcaggtgatagctgtccacctcaacacgggcactctcgtggctatacagattggtacatacctctggtgaacgctcccctctgtgcgacatgacgtccgaggagtcgaggtccgtgggacgacatatgctcggtgcatctgttttgtgctacttgatggtctaatcaaaactgcacccttcacgtccgtcgagcttagcgttctgttactgcgtggctacctggtttccgccacggactccatacctaacggtccaaaaccagccggaaatgccccacgcggggcatccttattcgaaccagtgacctcatgctggagtcaaactgttggacagtgccgtgcaggaccacaaatcactactgaagctggtgagcggggatgatccttacgagcaaaacctgcctcccgtgcgacatttcgagtttagttgatgacggacgcccgacttcctgcttgacagtggtactgcatatcagttcattgatcgagtcagccaatatcctttgcctcggtatccgatccctccacgtttacctcacctgtcctgctgtgtaagtccaggattagccaatcacctcgataactccagttgggttattacttgtcccacataccacttgattaggtactatacgtcctaccatcaagtattagtggaatgttagtgaacatcattagaaatagcctccaagccatgaagtttgtcgccgagtttagcgcggggaacactggatgcatgtagtttgccccattgtggacttctttcgaccgacaatccttatgtattgcaccacgtttcgcgtccagcctctaggaaggttgacagtatagtcacatcgctgtgttggccggtgacacggcacttataggtatgcttctatgatcggggatagatcttgacagctgcatgacggcccctaagaaagatctcaccaataatatgaacaggtaatacccactgacagcaattgaatcacctagtaagggatctaaggaagcaacatttgctcccagtctgggccccgccggttccttcacaagtccaacgaagtactatgaagcaattgattcgcagctgtaagaaggttcgggggcctctatctcacttttcaccagatggaaagagagacaatacgccactggcttgctgggacacatttagttgctcttcgaatactttgactttctgccgcatccccacttggacttgaaattccatggttgggacggaaaggttcgtgtccgaagatagtaataggcagtagtccgtgccgtcgagatcggccctaccattcgcttgatctgcggcgcaccatcatgactagctctttcaactcttcatgtcctcaccctctcgcgtgctccatgctctttcatgttggctattgtcatgtccaaaaataaattgacaataaacaacacgcatgaagatgttatgaaacgtgcatgaggcagataaagaggcgcagtaagcatagagtagatattcttagatacaatgcggactccagacattatatctcacagtcttaagaacgccctcaatctcaaggtgaaacacgatgtctatgtcggttgagatcctaagggtcagttccagtcacccgaccagatgttcaggtccctggggcgtttgaaacgtgaacctggccagtctggacaccccaagaggagaggcccaagtgagaacactgacggatttggaaaggttggcttcttggcgtaaatcaagcaagtaattttccagaagaagatcgaaccgggggggggctgtcctggagggggttagtcgttgctcagatccctgatgttgatcctttgctgtcatattgaaaatatgcaggtgacaccacgctgcgaaggagaaggtgctaagtcgggttacgcaacccgttttgaggcgacatggtgttgcttttgttaatggtcaagctcccatggtttcactagaagagtctgcaatcgtgatgagatggacgggttcagtctacagcctggtcgagatcgtgaatcaacccaagcggttgtgtccactttcgccgactgctcgcatacactagaactcaccgagtgagaccactccgataagataaggtaattcaacgtttgtgtagaagccaacgcagcttccattggacttctatggcttcagtggaccaaaggatcactccgagggaacaaagaaatcgaactcgagcccctgcggttcctgcgcaagccatccccctccgccgaagtcaatcctcccgcttgacggcggtagatcaccgtagggcaccaggtaagtttggtaacttgcgcctccttcccatccagcgatgatcgtcatgatagggatcaattgaggactaatctagaagtaggcggtcagcattagctgcattgggctcgtcggtgttgtcaaaaatagcgaccggtacacaagttggggaaaggttctcaagaacgaaagagaagggggttgggaatactagtagacgttgtagttgcgtccattccatccccagacttgcgtgatactgtcctactatcaagaagtgacaacctcgacgcacgtcaaagctgcgtgcggcagtcaaatcaaatcaattgtaaattagtacgacacttgtatgacccttcgccactcgcatctgatcggcgaaggtaacccatgattttagctgtgggaagtatcaaaagcaatcatgagagagatagtcataaacacttggttggtccaacagccaacatgaacgctggaaaacatggggaggctttgccccatgatccctgtcctcacgtgatcaaaaagtatccaaaagttaggaacgcccatggcggtgctttaccctatttgtctacggtaggaaaagaaaatctcatgaatcaccaataggcacccaaccaacatccacctttttatgccaaggatactatatactagtagcatgcatagtactgggggtaaggggcgcggggatatgcagatgaatttgggctggtcgaagctgtcatttctcttgggtctagccccagtgggaatatcagcctgtcgatcgcagataaaaggcagcactaatctaaaaacggcaggatagttaaccacgctaagtgtaaggcttgtactgtggtaaaagtgaattaattacagcggggcgattggctgtgtcagtgcgctagtagcaggctcccatgatctacctcccaggtcgaccagtctgaacgggtcggatacttcgacccgaccaatggtcgaaccaatgaacgtgtagtgacgctgttgtatgtgatcatactacgtctagtacttttccaaacctgtacgttaagacaggaaaggtcgaggcttcaatccattccatattccttctactggaagctaattagtatacaaccaaaactctcgacggcacgggcacacttccgaataggtaagaagttaatttaagttaaagtgagctgaatcagtgtcagtaattctaaccaaggtaccaatatctctttttctgcgagctgcccgttcccagatgggaactatagagcgagagtatttggaatatccaacgatcgatgatgcctccagaagatttgaccagatgcctccttctgcacactgattcatctgataccaatgagggcgaaatgagagacacgatggggaaatcggtaaaccccgtttggtcccgtttggaaccatttcaaacatggaactgccagcacccgatccgctgagcccaacagattcttcctcatcgagctcttcccatgcgcaccgtcgatgccatccttgtgatggcaagtccggcctggtaaggttcttactagcgatgatctactggttctactgtggagaaagcagtacgggatcactctctgtgtacatatggcgggtacacacaacgtgcgggaggaatgattaagcagggtaccgtggttgtattcgcacgatttacttctccatgagtgtgcttccgatgggtgaagaggctgctgtcccgtcatcctactgtacatactttttcggtgaatgggctcccatggaactcctatatcggcctttgatataccccaggagaaactttaatcactcctctcttctgtcatccagacacagaaaagaaagagaggcagaattgctatactgctgagataggcggtagttccagactagtctatcagatctccgactagtggagaatctgacaagtttgaaatttagacagcggagttggacatgaagaacgaatgagtcagggagatacatttctcgtcttcctgattcgatgatgctccagcgagaccgggggattccaaattgatcgacttcccgtgtcgccatgaacattcaattatgatcaaattggtttgtcactcacacctgatcgttccaagttcgatacgggatgataggtctacatttccggccaggcctgtcagccatcagccatcgctctagggattttcccgctgaatcgcgaacggaggttgctggttctgtatagggtcacagaagatcttacgattgtagggaggtaatgaatatcctgattctcaagggcaaaaggaggatttttgtgcaacgatgcttggacgttggagtggcagcgaactctattgaccaacccacccttccacagctacgtacgactagtcctgttactattactattatacttatgattattattattaggagtaaacctccggagagaagatagtgtgctgtctagttctaaaacggttcctcctggcttgatctcttcacccgcatccggtaaaagaatctgcaacaacaggagctttttcttctctttcaaccattgcaagatctccaacacaatttcatggattctgaatttggcacaaagggggcaaagagcaggaggggctattttggaaccactggtgtatctagtttgcagacagagacaatataaagaaggaaactgtgtgagaaatgcgcacataagaaaggaacgatttctatattgagggtgagggaccaacataatagggtccccatccaataagatttcaattaaaaaatgaaggaaagagaaaagtaagaatgggagaaaataatcaaaaaagacagaaaagaaaaagaaaaagaaaaagaaaaagaagaaaaaagccctcccccaatgtatcaaccacatcacctgcacccatgtctcctcaggtcccgacatactggaacaaaggcctcaccgtcaccacttagtgcgcaatctggagattggaaagtgggaaataataaaaataatattaataaaagaaatttcaaaaaatcaaactaacactgccgccgcccacagtgtacgttactattctgcgtctttttttatgtgttttatttttttaaataataatttattttttggtccattattttttttaaattatttttattctcctaatttagcttgagccagggtttcagccgctattcatggcctatggctagcatcgaccaccatccagaacggctgtctgcaacatcatgcgtcccactgatatctttcccttaacgtgccgctcttgccccgtcctatcctttacttatatcgtgtgcttttcctctgtagatctccaagcgataaagcaatcattcaatccactcttgccctggtggcttcattctcctcccttcacatttcacccacgaaccctctctcaatcaccgtcttcctcaattctattcttcttttgtctcggactgttccccttttccctttccacggctaccccactgattaatcgttaaaagggctacaggtctcactgccttgtcccttgctttcatactcactgggatctccattcctatccattgaacgactgccaaacacgagagattcttcccaagtgggctacaagttcctctacatattcactgaatatctctctacctttcgacttgctctgcattcttctgaaggaatctgtcccttctccttcagcaagttccatctaccccgctactgatctggagcactgcttccggatttgagcggtacaacattggacagaccagaaagagacatctggctctgtcgcaacaatcaccttgcaaagtggctacactgttttcctgtcttacttctaagggtgccaccttactctccaccatcaaacacaatataggtgtagctacagtgagcatggttcgcggccaactgccatctccgcctcactcagacggacatcccactcctgaacctcaccgggaaagctgcggaatcattcacccattatacgcacacgacgacatactaggagccggaatgaccatggaccatacacagcaggctgtggtaagcattcagaactggagtcaccacttgttgcgccacgctgacctctgccaggctttcgaatcatcaaatcccccccggtatcttgccaacaacggttatttacaacagccggtaagcacttccttttactggagtctcctagtggtcctgtgtatccgtttgttttcaggctaatcccttcttagatggcggcccatagcattcaagtcaacacaccaccgtctacctcggatgagtgcatcgtcgcagagcgaacttcatctgcatggcctcaaagatctgccaatcgaaaggcaaagagcggcagaggtagcggtggtcgtaagcccaaaacactgcatgctggagatggcccttcgttacccggcccgttgagcgagttgaccaagcacctgacccatgttcccatcagggatatggaaagttgggtacatcgacccatcgaggtccgtcgccaggaagtcaccaaaaagaatgggaaagttgccagacctatgaattcctttatgctctaccggtcagcatataccgagagaaccaagaagtggctgggacagaacaaccatcaagtagtgtccgtggctgtgggccacagctggaagatggagccaccagagattcgcaataagtttgaagtcctagcgaacatcgaaaagaagaaccatgtcaaggcgcaccccggatacaggttctctccaaagaaggaccatcgaagaggtgatgaccgtcgcaacagtcgcctggaccatacacctgattctagtcctggcttggggcagacgccccgtaccatgagcacatcagaaatggaaagcggatggggcagtcgtgactcaacccctataggttttatggagcatggcatgcccgctggttacctcagctcttcctggcaaacaaccaaccccggtaggccagccccaggcatgctacctccctcaccaccagaaccaacccagtacctccagcaatcgatccatcagagcctcctgggctcccatgtggaagatgtccgcgtcaacagagttgacatgcaagatctccaatattcttcttcaacggctttggctggcctaccaggtgctactcaccatgaacttcttcagcctcagacctctgtccctgcaccgggagccggtgccgatggtcagctagatccacagctgctcggcttccaaggcaacccgaacaatgggggagggggtcaaccctacggcaatactcactatcatcccatctggcaagactcgcatgcaagcaacaactacgctgctgcctcgtcgctaccgccggctacggtaccctatgtagctggcgcggctttcacgccgggtatgcaaccgatggtggatggtcgcgaggcatgggagccaggccatgatgggaccatggacacctccggtaccgagtttgaacattggattaaccctcaacctgctgcgttttagggataaccaagatctatttcgagtctgatgaatgtgatgaaaacgacgagctcgacgaacttcctaatggagatgtgcgtcgtctttgttctcggattggctccctgtttaaattgaacatcttgatgctggagttccaaggcgtacagatctaaatgacttagtgatatcccttctggaggcggtttctttgtttctaatatattttttttcttaagctcgccgatattgattcccaaggtggcaaactgttggttctgattatgtatgatagttctttgtcaatcgttcactcgcatagagttgcgccgacttttgtgattcagagataccaattcactatctagtaaatactatgtcatgtttctatgattactccctaaaagcaatcgtgcttatcttggtaagattgagcttttagcgggggttctctgatgtttggtttcaaaatgcactcgaagcattgtctcacgtggagttggcatagtatcattagcagtaatgaccatttggtatacaaggaatatattctctgcagtagagacagaacagtttaaagatatagtactagtagttacgtagtaatctcccatgtccgattgctaagctccagtcctacgtcgattttctaattacaaatattcatgctacatctatactacacccacactcttagtatttccccatcgaaagtatcttacgacagcgagctagcattggattgttgtactccgataattatagaagtcttggcagacgcgaagaaaggtgcatcacgtgaaccgcgttttctggagataacgccgcaggagggttgttactttatactcaacattgataatttttgatacccaaggcgattaaaaaaaagcttcgtcggagaaattcagacggattgacacacgagccgcgtacgactaactcaacgcgcaacatccagaatcatacaacaacatccgatccaacatccaacatccaagccaaacccagcaacaatctactacacgcagactatacccatagcaacacctcccaaataaccccaaacgcccatcacaatctccaccatgtacggtgaactcggcaacaaactagtccgtcaaaccccgacccccaaactaccctccctccaccaaacaaccttccccaccactaacaaaaccaacccaggtccaacacgccaaacgcacccaatccctcgcccacctacccccctaccaaaccgaactggtacgttccgtcgcccgcgaagtccgcgacctcgaccgtgatgtcaaccacctcctaacccccttctccggctccttcgacccctcccaacagcccgcaatcgcctgcgccctcctagtcgaccacctctgcatgcgccgcaacaagcgctgtctcctcgcgtaccaccgcgtgcgcaccgagaagctcgaagagctctgctggacgggcatcgacgtgcttgagcagcaggtgcccccggccgcggaggacggtgcccagactgttgcgagctcgcagagcggaaaccacagctcgttgagtcccgaggaggaagagtattttcggcagtatagtgatttgttggcggcttataaggggcagtggactgatgtggatcttacgggggcgttggaaccgcctaaggatttgtttattgatgttagggttcttaaggatgcgggggagattcagaccgagtatgggtatgtttctttttcttctttttctttttccttttaacctttcgtttcttgtgactttgggaagaagggaagactagtggggtgtgggggtttggtgctgacttctttatagggtgattaatttgacgaaaaatagtcaattgtatgtgcggcagggggatgtggaacgattgattgcgcagggtttcttggagcggttgagttgatggtatgttcgtttttgcttggaatgattgatttgcggatgttttctatgttcatgatacccatggagagtaaaagtagaggagttcaggcagatctgtgagatttatagtttcaaaaaaacacacgggctactgccacccttgttatatacagccttgttagatagcgtcagcccatgcagagacattgagatggaatgcctccagaatggcagccctggcaacctcgtcatcaaccgctgccttcttcctttcatccataagcacgcccaactccctaatacgccgggccacctctccccaccctaccctctgaccaccagtctcctctttagtctcaatatcaggagcaaccagcacatccttgagcttcccaccctccttccgaatcaccccatcaacaataacagtgtcaatgtccctaatagaactatgaagcacaatggccgcaattggatcccgatccgcagcaaccagcagaccaggcgaagtagcatcataaataacaatatccgccttcttgcccaccgccaaactcccaatctcgttctccatgttgatgcatcgagcgccgtggatcgttcctagattgaagacgtcccttacgctgctacctacattcttggcccacttactgtgcgcttcgaactcctcgtgtcgtcttgctcgtgcccactgcagcaccgtcgacatctgagtcgggatatacgatgtacaaacactgtggcagtcaattcccagggatgatatttgctggtactcgggataaaggcagaccgggttgccgtggcccatttggagttcagtgatgggcgtgctagagatcttcacgcctttgtcgcggattagttgggtgtgttccggtttagggttggtgttgtgggatagtaggatgtcggggcctaggaggccatgagaatcaaggcgattggccgctgatggggcatccggacctgtatatgcatttagtataatcgttcaaggccagggaaagcgtcatgaaagacatagtggagtggagttagtcaaagtacatacctccgaacgcgacgccgtaaactgaatgggatgtgatgagctgcgctccggcgcgacggactcgtccgtatatttccttcaagatttccccggggagatagagcatatcgaaggcgaatcccagccggactcgtccagatgggccgagtgggttcatagctgcgagttggtcaaatgtttccatgacccatggtgcaagtggatctggggccatttggaacttgggactccattgggttaccctggcagttggacagtacccgaagattgacctgactccggaggatatggttgctcggatagcttctttggctgcgatatgtcagaactatacaaatacgtggacgatcatgttatgcgattagtggatgatacttacaatgatccggtgtaatgttgatatgagcatggtccactacagtcgtcgttccactgtcgatacactccagcgcaccggctaactgaccccaaaatgtctcgtcggctgatacgaaagaactgacgaaattgccggtagggaagtaatcgaagagggtgtggtttgggtgtgtggccttcagacaggtttgccatacatgatggtgtgtgtcgatgaaccctggcgagacaattttgtctgtacaatctatgatagttgtgtcggaggatggcggctcaatattttgggcaattttagtgatttgcgagttctcgattagaaggtcatctttcgacgcatgaacgacgtcattcgcgtcgtggaggagaagtgtgccgttttttagaaggattgaggtgaccatcttgtatcagatcctatctcttgctggctggctagtgaaaaaggtttcgatttcttccaaggggcacatcattcatgatgagtgacagtatgcctaaggcctctttatcagcgaggtcagcatatgaaagcgggtatgatcccgcgggtatgatcccaaatagatgtggtattgaagaggatctcaagttcgtattcgtcgtggccacggggaagcccatgggctagagaatgaagaggttgtcactccagatcaaggaaataacaggaatgatgaattggttgttagaggaaccaaaataagctgaaatatgaggtaaccaccaatgccccaaaaatgcccgaatgccagtcggtggtccccattgcaattctaattatgcctctgggctcctccgattgggcgtaccaattccgtcgcagtccccgcagaagctggactgtgctctgacggtctccaagctggacatctgtgaagcgttgcccgttttcactctggcataatggcgcacagttcactaaaaccttatctagtttaatatttgtggagaaatttccagtcagaactagcacctgcagtcagaagcttactcggagcatagccctcacttgtgtgcacatagccatcttcatatagcactttcaatgcttcaagaattcgctttaacacatctatgatctttctttgtttttttcctttttttaaaaaaaaaaaaaagttcgaagtggtgactagaccgctctcaagatgcttcagcacaatagcagacgggtctgctagttcgagtatctcatcagtcaagggacgcaaatgctgtgtcttaggctggaatctccgaaggacatccccagagatggcgggcgaatttgattacgacagtctgccccaatttgtcactgtggccaaggaaatgtatgtaagcacattatttgctattgtttcgcggtttatgcgagaatttgaattggaacgcaagggcgtgtcaaagaaataaacatagcgtgtaccttcccagccaagtgaactcgccgagtcgctcaatagatgtatatgtgtcaggatagggtatcttgaagtcattgggacccaaagggttagataaggaatggataggctatggaggccgtagctcgcttactagctttggctcgtttctcaaccagacgatacatgacaacgtaatgtggtgcagctaaaatctgaccagtggcaagtgagtcatatccatcatgtaattggtaggattttggttactcaacggttgagcgttagagaaggtaaatcggcagatgcaggagtcgtttaagtgatagtcgggtctaaagatgcacgacaagcacggaccccttgcgacaacctattaaatcacatgtcaaccaagtcccacacgatgcctgcatgcctgaagcttaggcttgggtccagaatccaaattgattgatatgaaagatgaaatctccgtagtcgaatattaatttatgacagccattacctaatgttatagcaaggattccccattgtactattccggatcaatctagtacgacgctaaaccgcaaggagtggacccgacgataagttcctctcgtgataagacttttcttagtcaaagctctttagccgataacagggaatccaatcatttccccctccacccatactcctcctctaaactaacctagcacgacatactactgctggatggcttctcaaatgccttttcctcctctcgtacatacttttttgcgtcttcggtagtccaaataatgtcaattgcttccgtggtctgattgacacttgcgtcattcaggatcacctttttctccgcacccagtcttttggtcgtccccgagcaaccaagagaaggaagagtcaaagactcccgggacttcctgatccttgtaaaagaatcaggtccttccagccggtacttacgcgattctgacgaccacgatgggtgtcttccgtccacgaggccgcagcgactctcgcgtgtccgggctacctttccgccggtctccctttgttgatgatgaggctccagatgcgattgagcctcctgtagaacaggccaacaatggtagtcctccgagaacacctttggggatcgagtcccttgtatctggcgggacaagccacaggacgccaagtcgttcattctaccaccgatccttcaacagtactgcaggtgtgaaactggaaccttccctccaaacgcaatggctaccttggagaatgtttgactgactgactgactgttaaagatcccgctcgctattcgtctcaaggacttcgagaacaaactgcagaactagcttcttacgcgctctccttgaatggaagctcactccctgaagaacgaaatacgctgccgccgtccctcgatatctttcatccgatccaagatacagacctctcttcatcacccgcagacactgtagtcacagaagctctagacaccgagccacccactggccctatcgctagctcatcagcattaactgagatgatccgtaacccttccgactccttggacggtgtcaatggccggggtagtgctccaaagtggagtggacttggtgaaggtggtgcttccgtaggaatctcaggcacggcgtccggcatgcatgaagctcctagtaccgaacagacatctctactgcccaagtcaccccatacaaagcccttccgtagttatgggatcaccgaagatgttgagagtcaagacaccatcagggaacgcaaacagaatgcatttcataagatgctttcgagttgtatgatttgcttccaagggctactacatccaaaatcatggaatgggcggacggtctgggaacaaggtgtcatctacccttttagtctattgccttcagtattcctcggtctcttgctcaacattcttgacgctctatcatatggaatgattttgttcccgctgggagagccaatattctctgatcttgggtcagacggtatctccatgttctacgttagtaccatcatcgcccagctggttttctcatgtggagggtcaatcttccgcggcggagttggtagcgagatgatcgaagttgttccgttcttccaccagatggccttcacaattctggcacgtgtaggccaggataacccaaggtctgtcatcgcaactactattctagcattctcagccagttcggtcttaacaggcttggtctttttcttgatgggaacttgcaaactaggctccctcatcggtttcttccccagacacattctgatcgggtgtatcggtggtgtgggtttttttctcttgatgacgggtgttgaggtctccgcgagactacctggatctctcgaaatcactatccctactttggagaagctttcgcgtccagacacggtacccctttggctcgtaccattactacttgcaattggtctccttgttctgaagcgttttgtgcggtctaactttctggttggtggctatttcattgccgtcgcagtcatattttacatcgtgaagttgagtgccaaggtaccaatggataccttacgcaagagtggttgggtatttgaagcaccatcatctaataacccatggtggcacttctatacactctatggtgagtttgactacagatgatcgatgcaatatttctgaccgtgttagacttcgctgccgtcgactgggccgcctttcttgataccatcccggcgatgtttgcgcttactttcttcggagttcttcatgttcccatcaacgtcccagcattaggtatctccaccggcgaagacaatctgaacgttgaccgtgagcttatggcgcatggtgtcacaaatgcactatcaggattttctgggagtatacaggtatggtgatgtcccctctgtaacagttgccgtcatgctaaacctccacagaattatcttgtttacacaaatagtttgcttttcatcgacagtggcggaaattcacgtctcgcaggtattatgcttgcggccgctaccttggggatcctccttgtggggccagtaatagtcggattcattcctgtcatggtcgtgggggcactcattttcctactggggattgagttgatggaggaagcgctagttgacacgtggggaaagttacagaggcacgaatatatgactgtaggtacaatctagattttcccacagcactcagaactaacttggcaggtcgtcatcattgtcgtcactatgggcgcttgggattttgttgttggcatattcgtcggtattatcctagcgtgtatgagtttcgtcgttcagacatcccgtaaatctgccattagggcgacattttcaggcaagattgctggctcaactgtccggcggcctcccatccaacagcgattcttacgagaagcaggacagcagacgctcatcatcaagcttggtggctatctatttttcggaacaattgtcgacgtcgagaacacaatgagagggctgattgaagaggaagcttttaacaaacgtcctattcgatttattattctggacttctctcgtgtgtacggcatcgacttctctgcagcagaagccttcacgcgtatcaatcgcattctgcgaaagcgaaacgtgctgatgaccatctcagggctgaacaccgggggagatgtcggcagaagtcttcaaaatgtcgggctattcgagtcagaaaatggtgtgcagatattcgaagacttcaactctgcactggaattttgcgagaatgattatttgaaggtcttctacagccaccgtgaagcgttactgaagaggaaggatacgtcctcaacgttcctagaggtgcctgggtcacacacccagcaccatcttcacgaaagtatcgtgagctcccctcgtcaccgacatctccagcaagcagctactacgacgctgcgtgaggatgagacagccgtggtgcctccgacagcttgggcttctatgcgacagcccctaccacttttactccaaacattccaggggttaacttcgcgcaacgaggatttctggttccgggcttgtacatactttgtccgtgacacctacgcagctggtactgtattgttccaggagggcgacgtacccaatggcttctacttgcttgaatccgggatgcttcgtgcggaatatgaaatgccacaggggcggtatttcgagctgatcgtagccggacggccgtgcggagaattgccgttcttcagcgaaacccgacgaacggcaacggtcaaggcggaacaggactgtgtcgcctggcgtttgactacagccaaatggcgagatctgagggagcgggagcccgaaattgcccgggaactgctgacggttagcctgaagctgaccactgaaagaatggacagcattacttcgtaagtggttttcgccttattctgccctaagattaggcaacactaacccgatctagttatgttcttactatggcggcttaatgatgccatctttctgtttgtctaactatgcatgcttgggtaggtcaggtgtacaaactttttcgcatttgtcgcatattgttggtcatcatttgagcgttatatttagcatttggcatatgtgatacgtggatttgttgaaatatgattgcacatacttgtctatattcggacacgtgcttctcaggagctgatgacgcagcttccacatgacaggtgacaagataaggaataacgggaacccgtgacttttgttgacctatctactgcctacaggctagtggatctgagggagataggaccattctctatctgtttcaagatttcaggtggctgatatggagattgttgctgcggggtagatttaattaccagatatactatgtacggggctctaagatagacgtccgaaagagaaaataggagatggcgcaatcttgatatcagattcctttaaaatgaggtatgccgttatgtcaatgatccctttatgatataatgagggccaatttgcggacaatatcggaataccacagtacctatgctccgtatgtactgtacctatgtgtggagttacactcttcccccacccatactgccgtacggagtaatcttaggaaaactacagatacatatacgtaactagctaaatgtagatgagggttcattgccaaacaatggaaaattttgatacactccaaaacgccgcaatccaccagaaatacctataacggtccagtatcgcccttctaacctcccagtactagaagatcaagacacgcggaaatgaggaagacatgaggcaccctcgtccttgtccgttggacaacgagagacacgggccaagacaacgatcatcagatcgacagtggcctgattggttggataggtatcgtccgttgggctcgaaacggtccataatggaaaaggggggagtggatcgggttactaagactagtaagaactaacgtaatccacgggcgagcggccatcccgggcgagcggccaccacaccagaactctacgcacctcctagaaatgaagctattcaaaacaccgaaaaatgtgcatttctataaaaaatttaaatagtctgacgattaggatactgagtaattttatgttctagtatattacagccagaacaccttggtggagcacgtatacgctggctttctaccggagcgcctatatctactgaggcagtagttataggctctatagtagaatttctgccttgtataagctcctgagcttcctgaactgaagcgcctgattctataggcagctgtctagtagagcgctttttctttttaagtattctttcatgcgcggcgcgtagttctctggcttcctgctttgtaatagtagctttatttaaagctcgttcatagcctttgaaaagctgctttatcacaatcttagtaggcgaatcagggctctttgtacgagctctaagcagcttcttcagtgtagtttcctgtttttgtagttgctttagattatgaggcgttttaggcactgaattagtagacctactactaggtctactacctggaggtgttgcttctagctgaatatttagctgagataatacacgcttaggattgaaaggaataagaccagtagctgagaaaccgctgcagatattactagtagtatatatctgagctctcgcctgaggaaaggcttcaagaaagtcaagtttattgatgtggttgaagtctaatctcatcttattctcaaccagctgtccgtacgcgcgttttagggggccaaagcagcctatatcaagcggctgaagtaggtgagatgagtgcgcaggtatacagagtggtataatattgttttgactgcatatatcgtcgaactgaggtgttaaatgactaccgtgaccatcgagtattaaaagccgatatcgaccaaccgtacggccagcagtaaaaggtataaatagctgctgcagccaacgtagacctatctcatcggtagtccagccatttgcactcgtttctatacgccagtctgatggtagacccatctcgtaccagccctcaatatggactttgcctttgaagataaggcaaggtggaagaggccccctagagctaatatacttaatagaagtgacccattcccggttccctggctgtagaagaaaaggtctatcagctaactcagctcgagtaactactttagtagtagatatcaagcccattgcaaagccagtttcatcaaagttgtagatatcgtccggttgaatgctatactgcattatagtgatttgtacgcgctcaaaccacttatgtaaaagcttaggatcctcgtatttagcgcgctgatagttatagcggcgagaaaattgagtttttaactcctcacggcgtttaataaaagtatatacccagttttcaccaacagtagtaggagtatcactaaaaccacgctttaaaagtaagatattggccatttctcgtacatgagcaggtcgaggaggtgctccacgctgatctagcgatagaatccagtgtaccagcgaattctcctcattttgagttaatttatggccattggcgcgcgtttcggctcgaaaagtatggccattcaggcgtctccgaagggtagtacgtggaatattatagatacgtgctgcttcagctatagtgcgaatttcttgttttttaatagctgaaattgctagtagaattctaccttcttgttcaatagaatcttttagctttctggctgcttttggtggcatagttggtggttgaaatatatagattcttcaagcgtggttgaaattggttgacgtggccgctcgcccgggatggccgctcgcccgtggattacgttaagttaacttagttcctattactaaccacaacactaagtaactaactaccttgggaccaaaaaacctatggagctccaacaattggtagtactacgccgaagggattaggggggcctgtgttaaagggctttttatctatctggtgtttgagatttgtgttccctttttattaatttttgatatctggtcttttcttttcgccacatcaccagatccataaaggtaattgtttttagcttctgtcgctaattattgaagttaccccatatgtactccttatgtcgctgaagaaaagaaaatcagtgacgaacccatcctacatacgtacgtacgacatacatacgtgcctcccaccctaccttctaagcgagcatcaattctcctgcagggatggcttgacaccaccgcgaaaatacattggtagggctgcgacaaacattcctgcgcgacaatagtacttagtaccgcgctagggtgggacctcgaccatttacccaccatggcgctacgaagatggctatcgaaccacgtcctggaaaatccaagtgtcgattttaatctatcaccaaataatcatcgtccatgcctaattttacgatttgtgcctttctttctcgctagaaaaattagactagaacgagactaaatcccagaaaagggaaaagaaagaagaagggatgacgtgataggggttatccttcttttttatcattttttttaattatattttttttctcagtttgaggatctgttgtttctctctctttttttattacgatacatgtgatggttggctggacaagagtactccgttagttcagtcgagaatgaaatcacccatctcttcttcgattggtgtcactgccttatcgtgcaagtaaatcaccggaaaaccctggtttacgccatgttgaaggagggtgtctcttcttgttcattggatgggggtgccggtcacgggttgggattagatactcgagtcgcgtggccctgcctttgcaacttccaatgtgctttgcctattgatcaatccgtctgtactttcttcctttcccggggagtagtcactaggtagggatgcgaacactggttaaaggttggggtttgtgcaccgatggttggttggtaagtgctgtgtcgagggctattgtcaaggtatataatacctgcgattaagtacagcgcttgtacatccctctcccaaggaagcaccagtgttaaaaggcttgaagatgggatagagggtgtggaagcgccatagtaattaggttaataaaacaaggactagactaaattaagtagactaacgcagaacgcggaataagttacttggttagcttgtttgtggaaaatttctgtaagaatcgagatcgttggtggatccgtctggtctggtcttttttttactactttttctcccttactcggctttgggtctcgtcaaggataaggagtaagtgggtttgatatttttatacaatgttacatcgcaggaagatatataggtacctgagcgcatgaaaaaagggtatgttttgcagtcatatcattaacaacaaatcaaagggacagtacattgtattgccatgtaattggaagccaagaagaaattatttgttggaggttagcggccgaaggatggactttttcttgtttcccttttttttccctggtgctgcttcaagtacttctatcatgaggatacacagaccatatgactcaaggtaacacggttcaaccacaataacccactcaggttgattctcgaaaggagtctccatccatggtacagctcccgaatgggtggctcgaggtcccacaacgcggtgagcggatgacatgatctaaaacattggattttgctggtggtttgatctggtgttagatatcttgaagaactttctattttattctctggagtccatattccaatagttagatagagtacttattgttcggtggaaagaatttttcatttcttcgaggaagagaatagcgtaacgatcggtagttgattagggctacccgttaagctgcatgagcggtaggggagctactacagttcaagctactggtcactaagctgtcatagtgtcgttaaggtcccggggggctctcatctcctttttggaccactggaacgaggagactggatagggggttgctagtctatgtctatccttattctcccatgaagaatttttaatttgactgggtttagtttctggtcctagactaaattagggaaatttgccatcatatatacgagagaatcgttccattgacgtccatgcttcaaatccgaccctttttcttgtcgacgtttcaacctgttaccagacctgaatgattccctccccaggcgcttagaaggtaatcatgaacctgtccaaccaggcagagagattcgatggtacctattaatcatccctaccgaacgacatcgtcacctgcagaagtgtcgtcgggatgaggagcacctgatactcgtctgcatcaatccgatgggggccgccccttattctgaacgggccattggtccaaaaaaaagtaaatttaagtaaaaggaaataaaataaaatgtggaaaccaaaaaaaaacaataaaaaataaaaccaaaatccccttctccgtatactccttagctttccacgccccactcttctcctcctcgtctctttactctatacttttttttttccctggtgtccaaggttgttggccgccctgcagctcctttccctttctggggcttctgcccacaccctttcattattttcaccctcctttcgccccttctccttctttgtcctggttctttttcttttctttcttttcttcctctcttctctcttcattccattctgatcctgcacttcttccagagcaacgactttgttcgcttcttctctctcccaaaccctttacctttcgttgtgatacccgagctcttcaagcctcgtgctctgagagctcttgttttctgttaagatacccccttaagatacccaaacggacgtgacacttcattacgaagctatttcagcttccattaacaacttttaatctcatctctactattataattaccatttaatccctacaacatgtccgacgttcagaagcccgtcgaggagactcccgctcccgtccccgccgctgcgcctgtcaccgaagtgcctgctgagactcccgcgacggagactcccgctactgaggcacccaaggaaacccccgcagaggatactgaggctactcctgctgctgcagaggagaagaaggatgaggctcccgctgagcaacctaaggaggaggccaaggaggaggtgactcccgcatcggagggtgtcctcggtcacaaggcccccggtctcgtcaagtaagcgccgcatgtcgcaatggatctataatacaagtgactaatcacatgcactataggagcctgcgcttctccaagcgcttcttctacttcagcgaggacgctgtcgaggctaagcagctgtctgctttccaccagaatgagaaggccgctgttgccaaccccatcgctgcctgggctagccagaccggcaagggtcttctgttcttcaccaagcgcgctgaggacaagaacactcctactggaatcttcaacttggtcagtatattgctctatctgtgaaagatgaaatactgacgtggagcaggctgatgtcaccgacgtcaccaaggagggctccagcgaattcctcttcaaggtgaacggccacaagcacaccttccaggctgccaatgccactgagcgcgacagctgggttgctgccattgatgccaaggctgccgaagccaaggctgagaaggaggccatcacctccagcgagggctacaaggctgagctcgagaagctgagtaagtttggattgttcaaaaataggccgtcatcataatctaatattgtgtagccaagcctgctgtcgttgagcccgttaagaaggccgctgagaagcccgctgaggctaaggaggaggccaaggaagaggctgctcctgctgaggagaacaaggacaacaaggccaagagccgctcccagtcccgcaagcgcgccagcattttcggaactctccgtggcaagaaggaggagactgaggagaagaaggaaggtgacaagaccgaagaggccaagcctgctgaggctgctaccgaacctgctgctgaagcttccgccgctaccgagactactgagggtaagtaccaaagctacgcgattagttttgtctgaagctaactgagttcaagcccccgctgctcctgctgagcctactgaggccaaggaagacaaggaagagaaggaggaggaaaagaaggaggagaagaaggaagagaagaaggctgagactaagtccaagcgcacttctctcttcggcaacttcttccagaaggtcactagcccttctcacgagaagtctgagaaggaggccaccgcacctgctgagacccccgctgttgccagcactgctcctcagctcgacaaccctgtcgaggaggcttccgtgaagcccatcgagcccgagactgtgaccgcccctgctgaggctgaggctgctaaggatgctgcccccgcttctccggccgctgagactcccaaggacaagcgccgcacctctttcttcggtaacttcggtaagaagaagggtgactccgacaacgaagctgagggcgagtctaagcccaagggcaacaagcttggtggtcttttccgcaagcccagcaaggccgtgaagtctgagcccaaggagcccgccgccgagactgaggctaaggccgagggtgctcccaaggaggccactgttcccgagtccgctgaagagtccaagcccgccgagcctgctgccaccactgaggaggctaagcccgtcaacgtctcttccacctctgctcccgtccaggccgccgcatgaagtggttcttcaagccgcgtcattgagtatgaaaactggtgggatcaatatggagtacacgcttagtgttcctccctcccagtgatgagtgcccatgggcgcataattttcttaaaaaaaaaagaaagaaagaatcgttagtaattgcttattgatattattttgtgttgattccagtgtcactgctttggtgccttgcttcgcagcgaggatcttgccaaattgagtgtcaatgataccctctgctgctttggcggtcatttccgactctgatgttcttttcgcgtctgggtcgcatttcattcctttatgatatccgttcccgcgaggatcccctaatttggccttgcgtgcgttctgctgtgcgccgtccaaactagattgataccactgctgtttgtgttttcacggttggtttagttctgattgtcttcgccatttgatgcttcgtactttgataccctattgggaggaaggatggtctttgccagggcgggtcccgcgctgcgcaaatcgaccccaatcgtctactgtcgtgggcacgttccatggcgtgtatacgccgtgtgcactagcgcacagcatcataggtaatagctaatagaatccatacttgtctttgtacccgcatcgtccttgtaatgatctacttttctagaaacttcatagtaaaccaggtccatcatcatcctccaccgtgtgggtgacagtggaacacttccgattcgagccccatcccacggatccagaacccggagcagtggctttgcctaatcgtaatagtaaccctgtcataagcatgccgactaggatccgggatgtaccttaattgctcttgaacattgggctagcgaattggcatccgaatttgacactgtagatcaacgtcctggaatggatcaaccgagcccagggctatagggcaactaatgatccacattccaataattcgatttagtctcagacagtgatggaatttaggactccgatattaatttatttgcacttgtgaccttgcttacgaacataatctgggcaacccatacccccagtacttcaacgcagtgttccactacggttctgtgattttcgtcgaattagtgtagtgattctactaagtccgattaagcgtacggcgatcttcagggcgagtgccacatagtgagatgtatatagtacctccgacgccacgttctacacggaggtgatgccgggtggagctggacatatttgtgttgcagtccagggtcaaccacttgcatgatatatgacttctgtcattttgtgattagatttctgctgaatatcactgcatattctcgatcggctggctagtactccgtatacaatcatgttcaaatattcagagtggttgttgtttgtcatatgaaagacttgcgatatctctatacaatggatgtgttaagatataccttgagttgctatgttgcgtgcaatccgtcgctgtagacttctcgtcggtatttgggtctcagattatatttgggatatatctgagatcattagagggaatgaggaatttgagttcgctttctattttttatttgttatttctggtcttctcgagttgagacaggagctcgtataaggtgtaatagtcgggttctgcgtagcatgcttttgatagagtaccaatgagtgtacccagaatttggatgtcactatttatatatatatatatatatatgagacatacataatttgttcctcgctggttttactcgtatgcgttggtataaattggtggttttggctgaacggtggagcgccgagaacacctcgctcttgttattttgatgtgaaacattttgtttgtcttcacacggtagatatatataaagcgaattagagcacttgtatctattttatgcacatgcaatttcaattaacgagcaatttcaataatgagcgggtgcacgaagagtaagattcctaagacatcaaaaactcagtacggagtagttgatttcgcgccctgcgtctaactccttgacaccgagtggacacatgaccgagaataatcaaggttccattacatcagatgacaacgtctgtattcgctctctatgcctatttcacgatgacggtgattaccttctacttgtgcgcaattgtccaaacacgaagttcgattcccgcataattatcgcaaggatattcggcggatacgcccggcgtacatgcagaattgaaatacacttttcgcctctcggcgaaacgagcgaatactcgattcgagtgaagattcttatctgagactagactcgacacctggtcaggtcataagatgacgagtctcggtgtttgcaataaatagcggattgatttaaaattcagattgtgtactcgttgatgggatggatttaatctaattcaatctactccgatggtttgattgtgcccatgcttttttcggagtaggttggtttactccgagttagagctggtgcgcaatggacaacttttgttttttctttctttctttctcttcgggttctaagtctaaatggggttctcgaaacaacgggacctccacttttttgatcgttttcgtgaaatgtggtcggtttctatctagtgctgaatttagatacaaatagtgttttcttgggtttcgtataattttgtcatatgcttggagggattccgcctcaaatgagggtgaattttttttttcttgattctgaacggatgatcctcccttcttgaagaggaatatggagaaaggaaaaagtgaaaaaaaaaaaaaaaaaaaaaaaaaaaaaaaaaaaaaaaaaaaaaaaaaaaaaaaaaaaaaaagaagagagagaaaacaaacggctcaagcggaagagaattggggctgataaagtttggaaacacgcccttcgaccaaactaactgagcatggcggggagtgcaaaaaggaaattgatctccacgcacattattaatcctctcaagtcccctctttttaaccattcaggattccagatcgctattgagaaatgattgcaaacttacccatcatgtaggatcctgtagcctaaggtctcttacagcgataagtgcggctcagcccccattcaaacgggaattggctccatctgacggcgtcccaatgcagaccccgagacagcctggagaggctgtgaagcctgcaagatgcagtcgcaggcgggcgttgatgcctagacttttagaccggtaccctcattggacaatggatgtgacgggtgcaatactggacgcgaaccggtttcatcatccgcatcctcctctgaacagcacttacactgagactattgtagcactaaatcacttgggaagcggtggagaagccagccgagtacgagggtcggtacccgctgcgtaacctgcaagtgacttcaggttaccttgcattctctgcgtgggtgcaggtatcttgctcgtactcggccccaggcaccggagatgcctggggacaccctggtatccacttagcggacgaaggggccaatcagggcctcggatggctctatgactcacacctgctgaccgcgtccattggtctaacgcccaatatggttagtgtagtaggcggggaagcggtcggcaatgattggctgattgtcggatgaagggcgcacacactgcgtttaagaagtgcctgatttcccatcgttgcctgggcttctttttcctttttttctttctcttcatatcttctcttctttatatccacaccacatattatttcaacaaccgtcatcatacagccatatactgaacaagaactagaatatcaagaagcgttccacaatggcctctttctaaatcctcccccaggaaagagctcgtctatctctcgtgagacaggcatcatagatcctcaacggacttcgtcttttatcaatatatcttcaccacacccctcagagtctcctgtcccaggacctctgaactttagcaccacctcgggtagctcaagttctttgaacaacatttctacgttcgacttcacgtcgttcaacacggatcaccatcagcaaacatggctccctacacccccgccccagcagcctacggctcagaatctgaattacaacgacaacaacagtgccaactccctacaggaggactttgtgctatatccccagcatcccagggactctcgtgcgccagcaccctcgagtacaacccctagatatcctgcataccatccatctctggtccgtcttgggcacctttctcgacgacaaactcttagtttgcagcagcaacagcagcagcagctctcagcctcgccagtacaggttccccgcttgaccagacttgcctcgcagtctaccgggttccctctgtcttcgtctcatcggtttagtccctccactagaaagcacctcttgcgtctacgcgcagcgtccgttgcttcgaattctccacctgcggttgtgaattctgcgtatcccaatcgcccgcccgttcccctattcaacagtcccgccaattccacctatcagaaacggcaacaaattccgataaatcaccgtcgcataatgtctactcctaacattgctcaaggtgagctttggctgcgcttcgttcagtctcagaaaggggcacatgttaacattccgtcagatctccccgatttcttcgatcttcaagctgatcgcttcggggacgatttggttccgaccacggagcccaccatgctctcccctcatcagatgaccgccggcgtcatggcaggtcccgactctctggcagatctgccatctggcacgatctcgcccaaggatctgttcatggatgcctctgctccgccgtcggcctctttcactgatttgagcactccctcattcgagtccccagggtacttcagccaagatacttcccccatgttcgctacagacatggaactaggccctggcgtggaggagtggggttctctcttcccctcccaggacgatttctccttgggtctcgacaccactgcccttgacattgctgcggctctgtcgcagcccaaggttaaggctgatgtcaccccagcatctcctatgatccgtaccacgtcatcccgtgctacatctccctccgctcgctcagtcaccaagccctctcatgtggctggtgtgaacgcgcgccaaaggaagcctctgcctccgatcaagtttgattctcaagacccagtggccatgaagcgtgctcgcaataccgaggcggctcggaagtctcgcgcccgtaagcttgagcgccaggaggagatgcagcgccggattgatgagttggagaagtcactcgaagaagctgaacgtcgtgagcaatactggaaggctcttgcccaaaacaaggcctaagtgatgtaaaagtcggtttttagttaccatgctgtttctgcaagttctgttatgaatgggtttctgcggtgggcgggggctaggagcctctcgccaacccagatgtcggatgcactcactagtgcctggaactggtcactggtgaagtgacttccgacaggataaaagtttctattgttatttttaccatatggtcgtgtgctagcactttcggaccgctttgtcttgattatctctacttcttgccagatatcggctatctatcttctgatcattgttctagttcactcatgggctctgatgtttcattatttcgcaatggccggttctgatgtctcctgcttggcaggattgactcgtggctactaattttttggatgttttgcttgattacttggattgtttgatgcttgtgatttcacgtgtattagattgtctccgaatccaccaatcttgctcatcaaatagttctcccgaagtagatcattcgtgttgagtacgcatgcaacatgcaacgcgttacctgcaagtaatcaagaccaatgcctactctagcttagacgatcgacatgcataatgtagaccatgtaagaagatagataatttacatggaacaatcatggcatcaaagctatgctccataacaagcaaagcaaataaaaaccactatgaaacacaactcagacttgcctttaaaaacttcaccgtcccaaacctctctcaaacagaaccatcaataccatctagagccatacaacaagcaaaaccgacacacaacccctcaatccacaagaccaacccaccagcacactcctgcccccaagaactcaatctcaacgccatacatacacggattagaaccttccgaatccattaatgacctataccttcgctctgacagccagtgcagaagggggtacaataatgagcaggcggtctctttaccggtcaaagaacaggttactacacacattggcctgagtgagtctgggaacaggggaggctggatgagcacggtctagagatcaagattgcatatcactcgacgctgggtggatggtagaaatgggggtttgagactagatgaggtgtgggctcagaagtatctgattccttggttttgtcatcactgctgtgtttgtgttttgggggtgggttggttggggggagtgtgggagggaagaaggttgttgtttatggggagaggaaaagagtgttgtgttggaagttgaaagttttatttagctgagggcgtcggtgccttttactctacctttttccatctttgctgtccgcgagccgaattggatggctcgtttcttttctcgcgccacggtcgacatccctagtttgagggctactaggcgaagggcgcgcttctctgggtcgatgccggtcgtggccttcgtaggatcatcgctttctggctctggaaggccaaagccgcacttttcccagacgggggcttgcacgacccacgagacgaagtcttcgtcgaggtatggaaatcgtgcttcgcggccccagtgtgctattacccggttgtcgcgacctaggttgcgcttcccgagacgactgacatccaggtcgatctcatcgatgagcccctcaaacccgttgcgtgagtatgccatcccatgccgcgcgtatcctgcgaatagctcatcggctcccaggcctgataagagtactctggcaggggttgtatagcgttgcggttcggcattgccttcgtggctgtcgaatgcagatccttgtccccgtgaggcgaagtaaagtgcacatgcaatggacagatccatttctgtattgtgcggcctcatcagacgtttcactgtgtcacgatgtgcaactgtctccacgtaaggtatgtcgattgcgacaaagcgccagttacggccggggcaaacggcttgaagctctgcgaaggctgagcgaccggtgattcggtcggggcagttttcatacactgagcctgttttcgcttccttgctcgctgcagctgctacacgggggttttcgaaggcaacgttgagcaagtcgattgactcgtcggccggtagaagctcatgcgataatcgagcgaggatggtacagtcaagccccccagagaatagcacagcaacctttgtgttgctctctgtagtgaaacccgggggatcacgtacattttgaattctgagtgcaagagacgtacgaagtctttgctcaagctcgtccacgcaaggcgactcaatgctcagctgaggagggacgtcctgcggaacagacctgttcatgggaggaatggggtttctctgcatgaccatgagtatgtgtttcaagcatagtgatcagaaggacatacgtaccagatgaccaggagaatctacgttctcccatggtagtgtttgtatgctgtcagtgttgaaatgagtagcaccagtttcgggtgtaggcgaatcctgcatgacactgcgtgtgaaatcaatcatatgcacaccagttgtgccaacttcgtcgaagtgggtggatgacgtcccgtcgcagagactgcagattttaaaagccccagtatcatcaatgccttgaagcagggacctccttccgaggcaatccctgctgaaatataattttgcgttgacagcgtcatagaagacaaaagaaaaaggcccacaaattctactgataacatccacaactctctggatggcagttccattatcaagggcattggatgattctgaattgtaagacggcttcgcagcttgtagtagtagattaaatatcagttgggtatcattacctcgaatgggttcacctgctattttccaggcgtcgccattccagcaaagtacggattcagtagtggtgtccacaagaggctgggtgacaacttggtcacctctcatcgaaagaactgtcgagacaaacgtaaggagaatcggtacagaccttatttgatctgtgttgacatctcgttgaacttgttgaacttggaagctatcgggcccccgtttgcgcaacaaacagcatgtctcctcattgggaagtacgggcccagaggcgcttagggaaaagaaaatgccacacattgtagcattccggccaggggtggtgtttctcaggtagtaacagagaaatgaatgactcgcgccggacctcgggggaaccgtgaccccggcggtgacgtgcgggcagtccgttatactctcaacacttgtgatgatattctgacaactaccagagataacaacaagtgcgttctgttaaatccacctttgctggaggcggcttattaacaatactagttgtcgtaatactttccccgccgattccgttacacccgctgtctcggcacttattgctgtgatccttgacagcttgataacagcttcgacccggatgtttaaatcataatgctctgcgtcttcttctaaaaaacgttcacttcagcgacttaatctactagtttattagtgtgtatgcggctggcttatgtctgccacagaaccctcggattccccggctcctaatggacaaggggagatctcctcaaattctcacgatgaggggcaccgactagagcaaaaagtgacaccaggagattctgggccatctcgtgcgtcgcaggatgagccactcgccgattcgaaggataccaaggatttgaagcaagacgatatggaagcagatatacaggataccccgcagggtgcagttccagagtctccacgttcagtaactacacctgttgtcgacccgccgagcacaacacctacccaacaagagtcccttccggaacggatgaagggattgtctatatctacaaacgccttagatcgttcaccgtcgccgaacaccgatcgaccccctcccccgccggagaaagacgacgcataccttaaccagaaacctcagtctgcgcccacttcccttttgtcaacaaagacatcctctgaatggactgaaaaggaactaccggaagtaccggagcgggggaagaaagttgataatggcggggctggtcgagatgatgtctcccaaccggagattcaaagtatcatggagcaattccaggattctgcgcatggcgatagtgaggagctgataatgtcacctcgactggagttagctgggcaattctttggtggacaaggtcactttccccctcgacaatccagccttgatcaaacaaaagcagcaggcgagggcgcccaggcttcaaacgtcaaggtgggagcgccatccacttctcccgagaaacaacctgccttgagctctacaagcgtgcacaggagatcacttgtagaagagccagcgctaactcggcgctcgtccacgtcgactttacctcccccaccagaaccagagcctgatcaacctttcgactttcatcggttcctggaacaactgcgacatcgtactgctgacccagtggccaagttcctacgttcgtttctcaatgagtttgggaaacggcagtggatggttcatgagcaagttaagatcatcagtgattttctagctttcattactaataagatggccatgtgtgaagtttggcgtgacgtctcggacggcgagttcgacaatgctaaagaagggatggaaaagctcgtcatgaacagactgtattcgcaaacattttccccggctattccctccccgcccaccattccaagaagtacaagtcggagcaaacgaagagaaatggagaggctccatggtccctggaggcgcggtcagcaccaggaagatattgagcgggatgaggtgctggcccagaagatccgtatttatagttgggtaagagaggcgcatcttgacataccaccagtcggctcccatggtcgtcgcttcttaactctcgcccaacaaggtaagcagatcttcatcccggccatatatatattacttacgtcaattttagaactgtcgaagattaacagctaccgggcaccccgcgataaggtcatttgtatcttgaactgctgcaaggtcatcttcggtgagtgactgtctaagaaatgatatgtgtgggcgtcaactcacaaggatactacaaggtctactgaagaattcgaaatcatctgatacttcagccgactcatttataccccttctaatttatgtggtgctacatgccaatcccgagcatttggtctctaacattcaatatatccttcgcttccgcaatcaagacaagctcggaggagaggccggatactacttgtcctcactggtaaactatataatgcaaacctcggcaaattgagcgagtaactgactgatatatagtctggcgccatccagtttattgagactctggacaggacgagcttaacagtgagtgacgaagacttcgagcggaatgttgaagctgccgtctcggccatcgcccaacaaaatcgcgaatcggagtcgatagagccgaagtcgacccaacgatcacagtctacaccaaggtcttcggtggatgtcccacggggccggagagagacaacacaatccaacgatgaagacaacgctccagtagccgggctcctgcgtactatccagaagccgctttctaccattggaaggattttctctgacgagccagattcgccagaggaacgacggacacactcagcgacaacctcaccggttggcccttcaccacgacttaatccaaatgtttaccagccacctcgtaacagtggcgaggagcgacgatcaggcgaacggccccgcaatgcatcacagccacggcgggctaggactcgtgatgcacaggatgctgctgttcgacaggctagtgcagaggacgccgaagcacggaggatacaacgtgttgagcacaacaatatggtggagacgttatcaaacatgttcccaaatctagaccgcgacgtcattgatgatgttgtcaagatgaaggaggggaggtaagtgtttcaccgccattgcctagattcgacgcgaaaagaaagtggcttacgttgtttcacagggttggtctagcagtagacgcatgtcttgctcttagtgctgagtaaaatccgcggtaaggctctgtagtagtataattactagactggtccatcgcatggactttgcgcttccgtctatgatgcccatgtggtagtagcaattcatgtacttattgcgtgccttgaatatggcgcctacttgtattaattgatgatcacaactgctatagaaagcggtgcttcaatatacttatcgtaaagattattaccttaatcaatgaaatttatttgtagtatccatatctactccaaagcgatgccagtaacaacagtctgtatctctatgtggagtgagacagcttcccgctagttggactgccagcctggagggagccgtactactactacttgtagctactacgttagtactactagggagggataacgcctgaggcagcaacagccccttgcgtctgtgaccaatcatatcaaaagacagtcacctcgcttacactagcgcgttttcccgtgaccccacccgtcacataaaagcctccttcctccgaccaccttttgaacttttcttctttcttttcttcatacttaccttgtttgggtggctgcgatcaagaaggcggtccaccacggattggtccctgcattgcacagcgcggcggaacaatccgttcaacggccttcgggtcattgacaggcgtattctttggcactcttctctctacgagagatacccttttcatcagttcttgtgctatatgctcgaggttggagaagaggttcttttagtctccctgtagaagtacgcattctgcattagtagtccatctatttagggttgaatctgtaccttctcataacgactatcggctggtctggttgatcgttcaaagcttcatcacaatttctccctgccttgagagagtgcgaagtaaaatccttaacgccatacgcactagcagattgctgcccgtcgctcgtatgtgtgcctgtctgatctgtaggtcagactcattcgtcctgcctgggtttgggcaatctggtaagaccagccagaattgtttgtctcagcgttgtctgccacgtcactcttgtctttactgttgctccaaagcgctttacattcgcctacattcaagcccaaaagaccatcgcatcggcgtaaatgaagctatggttttagccataaagcaacataaacgcctttccccttccccgaccgcttgccttacgtaggacgctcttgagaagcacaatcagaatactctacctctccccccttgtgcacttttaaacatagcttcagaggagagggcaggcagtttatcagatagcccaattatacctcctccttctacaagctcctcacaaaggtcgtggtccagcagcccgactagactcagtgatgcacaatatcgcagcggccatcttcggcgcgcaaaaaccttcgtgggcgatgaaatacccgcaagtatcagtcactatatcgatacaagtattttccataatttaaccgactatggccttcaccaggtgtccgaaaggctctggagtaaatgcaaggaacttgagaggaaacccgcaggggaggccgaatggatggaaactttgtatgcagccatcaacgatttaaaacaggaagtgtttgaggctgttcgtaatcaaggcaagcttacatttccccgagtactatgttgagatcgggacgtattaggtcctaatcctctggttagattggcgcatttaaaatctccagtgcagaaccctcggcctacaattccacgaaaacgaagccagttacatcagcttttacgggggaatgccaccgctgatggtctttaccaatccaccgattcctcgcgtgcaattgaaccggctattttcaaactgaaggatccctggccagatatatgtgttggcctgtcggacgacagcttagcagatgcccttaggtccacaaaagatcgctatatcacgcaaagcctcttgctcgatatgcaagatatctctaccttaatcagtgatccgcatgttactccgttgggccttcgtttcccgtttttgatagtcgaggcaaaggccggtgcaactggatggaacctctaccaagcccagaaccaagctgcagtgggtggctcaacagcccttctgatccttaaaggtctctcgggtcttcgagatggccaggatctgaataaagaaaatcatgatgatgttgaagccagtaataagtccggccaagcttcacctaacatcgagttaaacatagtcttttctattactactgaggggccagttcatgaatcatggatttatttccgagagcctaaagaagaagacttgcatggtctgcataggaatctggcggacaaccttgaaagatgaatcgccgaatttcttacgtcacctctcagctattttgagatggggcaatggtaaattcaaagatcagataattagcgttctcaaggatttatgagcaaatctgtcgatagaaccggtctggttgaacaccctggcgacactcttttcaccagatgatcggaactctcccaccgggccgaaagcttttccaagcaaactactagattctatctatatatatcagtaaccttgcggcatcggctctcaacccggatcagatattaataaatgtatcgagttaatttattatgcattcattgcaacagggaagaacatttctattcaataacactcaactgacaaaaaatcacataaagttttaaagatttattatacgacgtttccaccccgaaaactacgatttgtcgatggcctagtataataatatgttagacacaagtgccactaagcagaatagttctgttgcaaaatatatagtaaacaaataatgtcaatctcactcgaccaaactagcatatagcatcaaagccgtgccttcaacacctaatgatccacaacaaatactactcgctaggcgtacaacagacaaagggaatatagaaacaagcaaaaataaaacatacaacagcacaagtatggtggtgctcatcaggcgctgcgtgggcggcttgctgccttattcagtcttccttcagggcaattcactctagtattttacctgcgggcaggaatcggtgggcagtgacacgctctggggtttgacactttcggtactgaatatacgttaatgtttatcgcagtgctgctaccgttgagctcgcctttatcctagatatgactgtatctgggcgtgatatggtgtgttaattagataatgctattcgcacgaagctcctaggcgtgttagctattatcattcaggactgtcttcgtgttattaaagcgctcaagattgacatgtcgcggattagcctccaacatctaaatatatttattggccttctgggcgagcaacaagactattacactcttacttagcttctgaataaactttggaacagctaagatgctcagcatttctggaagttagatattacgcttgcgctgggccgccgtctttatttggcccgctcccttgtcggcgactcaattgctgcgctgcgcttagctgaggatattgtgtataactgccgccgtgtgcatggtgcctctcaccccgctacactggatacctctgttcttttgtcgcagccgtacattagcgtgggcttgcggtatcagtcccacaggaacggacaggagatggctaaccggtactataaaaagagcgcagcgctgcatgagagcctgctgcgcatcttcagcgaccctttttttttttttttttttttttttgccgatctggagtgcggtctcgaaaatagcatgagtctggaaggctccacgtacgaccttaatttaggggagcccgtcgcccacgtcccagacggccagcgtgttcgtcggcacttgtacctgctgaaacttgctatagagtggctaggaggttggcccaagaactacagagagtatgagcggctcaatgcagacatcttccgggagtttacttctgatctacagagagcggagggcaacaagtatatgtatcattttctagctagcctcacgattcagagagaacatgaaattcaacaaagccagggaccatcgcctcctcattctcgtcagtagactcgtctagaaagaccgccaccatttcggaatgctcatcagcagcacttcggttgtcggatgccatagtccagtggctgtgcttggctaggtgcgcatcgttgacatcatgcggataccacgcacgatatttcacctttttcagtcgaattgcaaatatctgctcgcctggcgcggtgcaacgatgggttgtaccccgagccccttcgtgacccgcagaaaccccgatgtttgcagggtgggacggcggtaaaccggcgatagcgctgatgggggctgatatcgttccgctgtggtttgatgaccgctccaggtcatcagacgcagcggcgtcaaacaaagtgtagagcccgataacaaaatgtacctcattctcgtattcaatctgttcctgcaaccatcgtcggacctcctccctctcacaaagacgtctgaaccactgagttggctttttcaaggtataaacgcgacccttctgcgccgtcaagtcaaggtttgcatgggcagagcgctgagaatcccagctagcaactcgggaaagaaatgcttgaaacttgctactatttgtagctctgatagcggtagtgacatcctcaagcttcctaactgtgtagtccgtcgtctgcactggtaacacgctttctagcgtgtccaggtcgatatcgttgatgtttgggatcaagctggcaagctgaacgtcctcctgtgagaagaaacaatgccctagaataatctgtggtgacatggtcgagataacaactgctgctgtacgaaggcgaatggtaccgtcggttcgctgatgatctgacgacttcgatgctttttcgatctttaaggtgcgcgtcaaagacagtacaacggaagccagtcgcaggaaaggactccgtgttccgtgtcaggggtataggcgctgaggggcagtcagcgcgctataccgtcttttgctgttcagctcctgcgccgcagtctgcgactccacaccaacatctcctcccaggccagagttgggataagcattggaatcttctaagctccctttccctcgacgcatttcgatagcaatgaacgtcggcgcatgcgacaactcctcgttggccttcctcttgtccaggcgaggaagagaatcactatttcaataccgtgaaagcggggatccagcccatctcgacgagtcgatcgactttgcgcgtcaggctttgcacgcctcacttccagctgaacgcgcaacctacctcaacagtctaggatgtcgccttcgtgaaagattcgaagccctgggtaaaatccaggacatttcggaggccatccaggtaaccgaagatgcatccctggcaatacacgaccccacggagcaaatgttggttttgaccaacctggctacttacttgggtgaccggtttgaaagcagggaagacatgggggatttggaacgagccataatggctggccaggacgcacttcgtataagcagctcggatcaagggtcgcaagcgatctgcctgaccacgttgagcatccttcacggctaccgtttctccaaactcggggccttggacgatttggagaccgcaacgcgcatgggtgaacaggcggtagaactcatatccccaaatcaccctgacagggctatgtacctaaacgacctatcggcctgctacgagcgccgatttgagagactaggagatcccaccgatattgacaaagctatcaactgctcaagcgaagcggttggtttgagtcgcgatgattttgaccgcggccttcacctcaagaacctcagcaacgcactcggaagtcgattcttgattaaaggggacgcgcaggatctctctgatgcgattacctatgtaagcgaggcaatacagtgcaccccagaaaaccaccagagatacccgttcttgctccatgatctcagctttcatctggaagaccggttccggcgctataacaacattaccgacctcgagaaggcaatcagtcttgaagaagatgctatttccagagtcgatccagaggaccctagattgctcatgctctgggatgagcttgccgtactcttatccctgcggtgtgatctcaacgatgatatcggtctgttggatagagcgatagaattggcagaaaaagcactggactctacaaccgatgacaaccgagaccgagcgcagtatttggctcatatggccgctttccgggccagccgttttgagcgtacgggaagcttaaatgacctggaacaatctatccttctgggaagacaggctgttgacattattccaaacgatgacccgcacagggttgatcttctattggatctgagcgattatcttcacaacaggtacatcaggttaggatcaccagaagataacagacaggcggttgaaatcatacaaacagcaatgcagtcccaaacaaagtatgcctcgcttcgaccaagtcaactgtgcactctcagtcaccgtttccaagaccgatatggaagtacaaaggagaaagctgatatcgatcaatctattcaacttgctcaggaagcgctcaatcgtgttcctctggaccaccctcagcgcgcgtactgccttcattccctgagcagcgctctagaaaagcgatttctagttcttgggaccatgtccgatctggaaaagtctatcgagtacagcaaaaaagctctcgaatctacctcacctgatcgctctgatagaatcgattacttatatgcgttaagcattaagttgacatctcgatacgaactgctcggtggcctaatcgatctagaagaagccatccacttgatgcagagctgcatagaaagtgagccaccgaactatttgaaccgtgtttcccatctgaaaaccctaagtgaccaacttgggtatctgttcgaaaggaacatgcatacggggacgttagatcgggcgattgatacagcaactgaagcaatgaagcttatccccaaggacgacatgatgggatccagcattctgaatagccttcatctgcttttcatatcgcggtttaagacaacaaataacctatccgacctgaaatcagccatcgaggcccagcgtgaggccataaaacgcgattcccattaccgcggagatcgttccattttgatccacaatctcagcgtgggcttggctctttaccagcacactggtgaaccaacagatccaacggaagcgatcaagctaagctgggaagcagtcgagacagcatccgagtatcaccccaatcgcgccatgtatctcaacacgtgtggcacgttcctgaaggagaactacgaactcaccaggcagataattcctggggataaaaagccgaaggatttgttccttgaggccttccgccatgagagctctcctccgctagatcgtatcaaagctggggaaaatgcctttgactgctatatttccaatggagagtggactcaggcaaattcggtggcgagagatgttgtgaagctcttccccttgttggttccgcggtggttaagtcaagatgaccagcaacatctacttaaaaacatatcgcacttcacatctcgtgcagcatctgccgtgctacaggcaaatggacctccccttgacgctctcaagatattggagaccgggaggggggtgatagcccgctgcagtatcggtttgaagaccgacatctccaaacttgagaaatcgcatccctcattgcacgatgagtatactatgctccgtcggcaactttcccttccctctttctcaacattctcaagtgcagcggaaccttcccagccaacattgatatgccgacgacggaaagctccaggattactcccaccccatatcactaccaccggacccgaaagggctgaaattttgcgaagaattgagcatttggaggaaaagatccgtacatttccgggatttgaggacttcaaccaggctccttcacacgcgtcctacgctgagtttgccatgtttggcccagtagtagtcttcaacgtcacagagcagcggagtgatgcgataattgtcgccgaaaatgatgtatacggtctgcatctggagcagcttcgatttcaagacctcaaagccaatgtcgcgagagtgataggatataaacgactgtcgaagggggttccaaccacgagaccgcagcgcaaccgggagcttcaagacatactgcactggctatgggcgacagccgtccaccctgtattaactcgaataggcttatacagcgacaaaccgcgatctgtactgccgcgtgtctggtgggttgcaagcggctacatgggccttctcccactgcacgcagccggggatgcaactcgcaggacgatggactacgtcatttccagttatattcccacgtttcaggtgctccgattttgccgggaaagacgtcgcatgtcattccgcgagcatgagccgaagatgctccttgtgtctgcgccagaaaagctcgatcgacaaacgttgaagacaaacgtcgagctcgaatccgtcagagaaggccttcagggtcatcaagtgtcctacacgatgcttgataggccctcgcgcgatgacgtattccgagagctccccgagcaccatctgctccatttctcatgccatggctactcaaacgctactgatccatcgaagagcgctttggagcttgcttgcacagctgaagatggagcaacctcgcagctcacagtaagggatctgtcactcattggtcacgaaaaagctcagattgcgtatctctctgcgtgctcgacagccgagaactcgtccgacgaactcctagacgaggtcatacatatcgccagtgcttttcagctcattgggttccctcatgtcgtcgggacactctgggaggtcagcgacagagctgccgttgaagtaagcagactcttttacgaacagctgggccggcagatgtgtaatggtgacgagtcaaacatcgcatgctgtctccacgaagctctccagacataccggaaaagcaggaaagtttcaagaacgaatgatgtcctttcatgggccccatttatctacatgggtgcataatggaggccctcgttgcaattacttgtcatcgcagactaatgtattattgactttttgttttcttagatttgttcaaaatcgcgccaaaacaaaatctactgcatgctggctcacctctcgtctaggcacgaccagcagacaggactcagtcccaagttgcacagttaacttagattttaaaagtttgctatcgtactgcttaccgcgatttcagcctgctaatcttatgtcatacgccaaactagcgcgatcttcccgtataatctatactatatgtcccgcttttctaaatcttatattagaagtgttgcttattatagctgtagtataaactcttagagtaagccgtctgtacaatcttacgatgatatcggactctgtttagttcttctctagttagcctaagttaatatagcgtgaaagaataggagagtaagagaagaggtaggcgggcaagaagaccatctatatagaccacgcatcttgatgctaagcgacaacgatgcgctttctctaattaggcgcgctataccggatgtgagtaattcgctgtcaccgcagaatacagagttaatggctgacttccaaagaatattctatactagattcttagcgttctgtggttcgttgccagcataactaatcacgcttgttcgacatacaatatcaagtggattgaatctctgcttcaaagaacgggcttagacgcacatcgttgtaatgcactaaacagtcacgcgtattgacccaaggcggcgatgacgaaaaatggaccaagttaagccacctaataaaatattatctcttctttgaattgtagtgagacatagcacggaggtcaaggtatgcgaaggagaaccccttttcaaagaattaaaatacctggtagcggcagtggcttattgtaaatccgatcctttgggacacgttagcaggcggggcagtgggtgagttttagacgggcttcaggttacattcaggcggcgggctgaaggggctcaaggtataacaagagcactgagccgaacaaaaaaaaaaaacagaagtagtgaaacaaaaacatacaacaggagggattcgctggtggtcacccacccaactactaacctcccggcgtgtggcttaagtacggctgagcggacgggaagccctgttctccacaccctatggtcgtatgtactggttttcactgtacagtagtatatatagagcaaaatcacacttgaaaattggatccttataaccatatggtgactgctgctgctggggaggaggtgggtggcgtttgaactgttcctcttttcctgtctagaaggcgaacacatattaatcaggaacatgatcgaatcttattgccaggattgaaactcacttgagtgcatgataagctcccgcaactataaggcctttagtgaggattcccatggtgacagtggtagaaatgggagaaagcttggtgctaagagagagtatgggtcgaaaattcgtagtaggaattggtgttggtgctgatttatgagttcaagtgagtccagagcatatctataacatcagctcttgtcagaaatcgctatctgtgtgtggcagtgtctaatcctcatttttacagcccgtcgctcaatctctcctgaagggtagttatgacgataatggaaccaatagttgtaccaatttcatagagggtatccgtagatgttggcctattggcccaccctagacatagttatcggatgtgggctgttggctgggctcttcttagccatcctgagtgttggtcatttgagctcgcaatcgatgtgagagctggagcaagcgatcaacaagcagagtgcttttaagttctagaaggtatccactagaagtatgaagcttcgggtacaacctagtgtcttggcatctctctattcctaattaaattaagtctctgcctaaggcatatgtacactactcacagatccgcggttattcaattctgtttctgttaatgataagcacggtagccctgttagtgatttaactctttaccgaatcgggataaaacagatgccaagacaatctatacttttgaattgacgtagactgcgacttctcaacctcgaggcataggaccaaggactaggaccaataatacctactagttgggtcgaagtgcagattgtatcttggcatttatgttttcctgtctgggtacaaaccgcgaaatggggctgagtttggtctatattcatcgaatttgagtcttgttccatggggcaccagtggtactggctaggcatgatgattctcctggtcgatcaagacatgggttcaacaggcctgcggacaacttataaaaagcagcgttttagcccttgtgtttgagattgacaattaatcctatttctctaatcaaatatccccattcactcaagacgttgtacctctctctatagctaccgcgaattcaactctctcctcaaatgcctgataagacaattgattgacaccatgctcggtgaatgctaataagaatccaggacactgcaaaccactataacgtttaagaatgataaacggatcctgaaccatgctgcgaaagtacataagcagttcgcgcaaaagttgactcaaggaattggagaaaagaatttttacagcatcgtctttttccaaccgctaccttcattctacgccgaaatcagggaggagaaggggggcagcatgtttgcagataccttgaaagatcatgatgccgttctctggactgccggcgtgttcgtgtacaccaaccaatccaacttcgctgtcgctcaactccgaatgaatgaaatggttgcggagcttaagagcttttcggcctcagttggtggagagaatccgctgatttatctgaattatgccgactttacgcagaatcccctcgggagctaccctatggagaatgtggaccacatgcgaaaggtcgcagctaaatatggttcaaagggagatctccagacccgatttcctggcggcttcaagatctccagagtggaaggaagcctaaacccggattctccgtgatgaataatggccacagtcttgaaacgaccgagagatgactttgctttttccatttttgatcatttgctcctctattgtatgtcccaaatagaacactagtttcgtcaactcttatcattattgctattgttgttgttatttgaccaaggataatctttgaatcttgacttcatcataatcccctaagtttacgcatattcattccggagtccttctcaggtactacaaacataggatttgataagcaatagagaatgagtatagaagagagtgagcattatgaatccaaacgaagtgttctataatcatatttcttgtcggcgtaacgttttgaaggggcggaactgccgattcaacttcggcagcgaggtaatgttcggtgtttatatgtgatattacaagggagagtctgtcgaacgcaaccttgagatatgctatcttctcactcgtacgatgtcacagtttaaccttgcgaatggttttcgtttatgtatagtaccaaaacgtcagttactgtattttatggagtatgcacgctcgagtctacattctgccctctcgccctatgtttggccgtctgcttgtccaacatcctcggttgatactgcaattaatgccgcgcagtgtcaatgtccaagtaactctccactaacatcctcagctcaacctcactcatctctttcacacccaacaacccattatccaaatggccagaaaagtcacagccgtagttaggatccccacatccaacgatagagaatcctagcattgctgtatctacatctgcccggtcacctttggctagctccgccaaactctccttcctcacatcttccgtatcctttacaacagtttcccatgcctttccatctttatccttcgcatactggatcagtctgttctgagtaactagagccgaatggatataaacaacccgattagcagtctcaacctgatgctcaatgacaccgagaacgcccttagcaacatccgccaatttcgtggcactgaatggcacatcacccccattatatagagtcgcagtgtgctgcttcaggtccagaataatgcccgtctcaagacaccagtctaggaaaagcccgttggcgatcgaagtaaaggtgaactctggatggtgattggacttgtcgaggaggtacttctgcgttgcagctttaggcgcacacactggtagttgcacacttagaggattcagagagtccattccgaactcggctgggatgaatcgcttcacgcctgcggcgacggccgcgtcaattagggggttttgactgcctatcgccgacgtggcgaggcaggaaacaacgacgtcgacatcttgcaatgcgggaatcagggattgtacggaggtgaagtcgacttctttgatggtttgatttgggtgcggattcagtttagatgaatttccgcctattcgtgagaggactgtgacatggtattctgcgtcgaggagggctttgagaatagggatgccgaggtttcctgtggcgcctgctagtgcgatttgcgttgagcgcatattgttatggcgattgattggcctggtctaaagtgaatcttgcactcgtaggattgggagtggcggtatcgtcaggaatgggtcagtggagagttttcctgttgtcatggagaaagagaaagatgtcaccagttaccagctcctttctgggtgtttaatagattgatttaattgcattgttggctcaacaaatcggggtatttgtaatgatttgtgagcatgcttatcattattaagatatctctctatttgtaagctctgtttagttctttgtaggtattggttgggaaatcataatcgattcaagtcaatcaatcactgaagctcctttacatcaccagggaattgatgacacagagtaatataaagttctatttggttacggtttaattgagtgatcaactaagaaatatgaataacaacctctatagttgatccgtacaaacaagccgtgctctagaagataggcacagagcttgtaaggcgcatgttttatttacttcctcaggatgctctgaagtattgacttgtcacactgaaaataaaagtatgtttacccgatcgcttgttgaacttcttagttttagttatcttagttatacactaaaatgattttaactgctgttgatcttgtatccgcttgatagcttcgacaaagtatttcttataaatgacgtcagtcgctcttgccacacttcccgcaaaaatcccacataaacattgccgaagtcccctcaataacttccagtacctttatctattctcattaaatcatctattattcaacgcctctatcgctccatcaaaatactgccaaaatgcctatccctacgtatagcgaacaagacacttcgaacactccctccactggcaccgctggccaggcgtcgctcgaaaccgtttcatccacgaacagcggcgctggtcgtgccctcgggactggatctggtggtacagttgcggcacctggatactcctctgcgtcgggagatagaccattgagcaaagaggaggcggatcggttgtatgaagaaaggatggaggaggaatatgcgaagagagacggaggggcatgatttaagtctggccgcgggggtgatttaccgggcttatttggcatattggagggctatgatgctatgatgccatgacgccatgactgtggaatactggatatatgaatattcgtgcagttcagtactatgtttggtggattgctggtcctgggactgtaccctaatggcttgtaacagatacagcaataagcactatcctctatatcctaagtttataagcgattgaagaagataggtagatttaccattaagtattaaaaattttgagaggttgaacgattcgacaaagcgatatattcaagttgtgtagtttgaaccagtgtggctcaatatggccaaatttatagacatttgggaattattaccaagaatagacctcctttatgatgagataatatatgtagacaacttgataatcacattgtgaaatgcccagagagatatatctgacgttccaccaacagtacagttcagttgaatggttttaggttaccgcggcctttaatagaacatattgttgtcagtcaatgaaatgattcaacatatagtcgcctgatctggcaaggatatgaatggtcaggcagttctatatcagtgtcactagtctgcattcaatatttaaaagatgatgcaagcttagaagcaccaatcactcctcaagcccgcaagtcctgcgcgattcttaacattttccgcgacagttaatctgtcctcccccgtctcctcaatcacaaccctgcgcttcatttggcttttttatgataacttcccgcgtttatccactgctacgatgataatctagatctgttttagagcgacagcgggactcatcgaagacacatacctgccgtcttcatattcgaagaaataatgcttcagtggaggcccaggagggtatctactgttggtatattactccttagacctgatacgctgtagcacagcttgggctgcgcataataacgaagcagtcatgggcaggtgaacatataccgagcattacgagagaccacaatcggtagtacgcccagtaaacttattttctgcgtttatatgctcattcttctgttcaaaaaggtctcttgagtttcgtgaaaccggcaactgaaaggctgccccaacctcatgcttaatactcgtcatttttttttggcaatatatcgcggccatggatcacttccttgttcctcatggtttggctactatgtaactccgagttagcttcaccttacagttcaatcaggtaccactagaaactctggccaacaactcccggtcaaacggcctatttatagcccctgagaacgtgtgaaggctatgatactatgatgctgttcctataggatactatggatatatacatctccgtgcagtgcaggactatatttagtagattactggttctgaagctatatcttaatggcttataaccgacacagtaaaagcaacttgtgtgatttgaaccaatgacactcaatatagccaagttactcatctcactcctgactaatatagacattaccaagaatagatctctttatcgagataataacacgtgtatgatctgctcttgattatacacatttcttcatgtcgtctatagaagaccttgtatagaattgtacagcttactgtgatgaatttttgataaattgccaaagcacatatctcgtttatagagtgctgtgcctgtggttggaaaatgctagcccagtgtgacagaacacgaggttgactaagatccctaaccaagtaaatgtggtgatatctctacatagaaatccctactgtaagcccttcgagcatttctcagcttgaatagctcgcccaaggcagagttttcgagcttgctgcttattgcttaatccttaccaaacccctagcctatagtgatttagaaaatatagagagcgcgtagagctatgatcttctattacagatgactcaggtcattgcatttgtcttaagcctctcttcttaggcgttctcaaaatgaaaccgccagcatgtctcgggtcttagactctcagttcccagatcaagttgcacctatgtagtcttgagatgaatttgccaaagtcgatcaaccagccaacacacgggaaatttcgaaggtgagatgctctctggcagataaagataccagtcgtcttcctctaccagactcaaagtacgtgtcaatacggtggcactcttagtaatggagatagaaaccactgtcctccaaaccaataatcccagtaacaatatattcgccactggggctgggctcctttttaaccataatgttgttagttctaacatcgccgtgggtgaacactgacccaggtatcaaagtcgaattgtcatattccaggaaagaacgaaggagcttcacataagtggtgcttccatagtgacgagcagagaattgtaagctgttaaactccttggtagttgtaatatttttaaacagggtgcattcatcaacacgaagctctttggccccttctccgttaaccccacctaaaggactaccgtcatcctgtcgaatagttctcagacgacagaaaatctcatccagctggtgttgtatcgatatcttctctttatgggataaactaggccacgcttgggctaaagtttggcctggaatatatgacataaatataatgcgaaaaggacccaatgctatcagtccatggggccttggagcagaaatatcaggtacctgcttctcaaggtattgcatacttgtgtactccgtatagtccttactgcctgttataactttggcaacaatgtcctcattgcacttaaccaccacacctctaacagaactctcccagatctttggtgaatcccaaatgagttgtttcaaggatgcaataagcgattgctctgcgtcgattgacttattatctaaccatcctcccgaatactgtcctagcacagcggtcactttatcagacaatggatagataactgtagcactctctgcaagatcaaggcgtgttcggaactccggaggaccctttgtctcagtctcttgctctatatgtgatgcagcctttggtctggtcgcaattcttatcctgcgagaatagtttgggaatgcagataacagattgacttccggttcatggctcagaatgtcataagagttcgtctagtacctggaaatttatactcgcagcatatgataattgaccgtatttagcgtttcgatgtccttgaatatatgagtcagagaacatcgacatcaagtctgccgctgggttcttctctaatgcgtccaagaatgccagcatgagatctctgttccattgtgccgcgttagaggcggagaatgaaattgctggcgcagcatcaaccatgttgagggattgaaacagaagccgatactgaagaaaacatttcagtatctaaataacagtaaaagagagaatgttgttggttctcgaggtcactatttgtactgcgtacgaagtttgcccgaagcagctctatatcacgtgacgtatttagaaaaagtctcctgccctccgtttcgaacccgctccaataacaaaatagccattctgcacctccatacattcctacctctatatcaagctgataaatgctcaaaaaaaaactggtagcttctctttgattgagcgtgtcatccttagtgcaggggccatgctaatcttctctgtatcgtttcaaattgaccaaatgcccgaaggcacttgttcttctttacaatgatttatttacccttcaaaagataaatctgagcagtctgattggctgatggtttagttgagcgggaagcgtgggcttacataagtgccaggaacatcaaatgcgaaaaccccgctttgccgcctctgaatcacccctagacgaggttcgtattgtttgtctatgtgctgagttttggagtagtctagaatacgatgagtaatactcaatgcatggagtccttactttgtggtatgtatgtatcttggctatcaattgagtatctttgtggctgaggagcacgagttgggcgtaatctgggtacaagatatataacggactggttgttaatcacatttcaaaagaaaaagaaataataaaaatagaaaactgactatgattgaattagctggggattgagaaagtccaggatttgatcaaagatggagaagacaaagagaatgaagcaaaaagcaaaacccacagttgatttctaaagagaagtgaaccagcaaatctaaagtgtggtccaagtggtccctcgtatttccgtttgaatgagccggcattattggctcggggcttattcgaacaactactagcaagatcaggggtatcgaatgggagacatcccaaccttctcttttcctcgataatttcaacacgagcagttatggatctttatcaaaaaggggtccaagacgcaagttgcttgactgttaccgcgttcccaatatttttgtggtggtgtgcgccgcgagacccacgctgtgctattcctgttcctgacgcagatcttcttgactcgatcttgtcctaacaggctagttcgacgagagtttatacgtcgactagtacaactgcagttggttggaacccaagatccttcatttccgcaatacgagatgatgagcctcatcccactgtaccagccccttttggctgtggatctacgctgatccgcggaaaagcatctccagaatggatttcgtttggtccctgaacctcgaaaagacgtctattctagggctcggcttgagacagatgttagagatgctaatctcgagtttaaacacgagcagtagttgcttggagcgttgatcactacccacgggagacgtatagcgcgagagtgataccacttttggaaaagccatctgaatgttgagaagtttgattgtacactcatgtgcttccacaattcatgtctcgggggaatataaatcattgggggtcgccataaagaacaggatcttcaaacgctcattcactcctttcgttcattaagtttaacaggacatacttcatcttttgcttgaaccaaaaacttcatctataataccctctttatttcccaacgttccttttaccacataacaatgcagttcaagacgcttcccttccttattttggctgccacagccctcgctgcccctgaagcccagccaggggacacggacagcgcccagtcgtacattgaccagcttgaaagcctgtaagtgctgatgccgaccagaaagttagatttactgctgacccacgaaagtgctacccagacagatatgcccgaaggcatgccaaccaatatgccttcgatcaacacgcctcccccttccatcatgtcggtgctcatgactgctgtccctgcctctctactccaggatatggggaacgccgcttctcgatcatcctttgccagtgagatcagtgccggccactatcccgactggtacaagagcctccccggcgatgtcaagacctacatctccactgcctaccaaaccgacgcgcaggccaccggtgcgcagaagaccggcgactccaccgccaccagtggacctaaggcgaccggcacttctggctctgactccaagtcttctacttcggaggctggtgctgcccctactggtgctgttgcagttggcttggccggtgctgctggtatccttggccttgctattgcgctgtgagattcaattttgcctgttctcattatccgcatccgaagaaaggaaaatgtctctttattatacaaatcgccttagatatatcccattcattatcatatcttaatgcattcttatgtcagttcggcttagccttcagttctctataaagatagcactgctattcgtggcccactttgcgtagtttctaaaaagccaaaccccttttggggcttcgatgaatcgtgactgagctgatttagcttgagaaacaaagagttcgagaatgacaagactgtgtccaatgaaagaatgctgacataaaaacggtgtgcctactagtgtcctttatgtcctggtatttaagtcacttggatgtaggtttctttcctgacccttggcaagttacaaggtaaatcaaagaatcaatatctcttcatttaacaatctttaactcacataatcatgcttacccatcttataaatacattcaccccttccaccactccttctggcactccttgttattggcaactttggtgccatgatccatgttcttcatctcctacccgagaacggcaccatcgaacgcttcaacttcacaaccccatcttccgctaccaccttccgccgcggcggagccacagagcaggcgcgtgagcagatcggaacggtcacacttcacgttagagatagcgagactgccgacagcttcctcgataacgttgagacacgaatccgtaagctgcggaatgattccctgagctcgaacccggcgcagctgcagataggaagtgctgaggtgactcggctagtgcgagatgtccttcagcccgtggcgctcgatgcgattcacgaaagagaggggcgagatcgctctatgaacgtgacgcagacgtaccctgtttttgttgcttacatcagacgctcgagggcagggaggatcctcactgagccgacgagctttccttcatgatttcccagcagttcttgcgctcacgatatgaatagcagttgtggtgttttgaaataacagtaatatattaacacaattttgttctgtatgtagcgtgctttgttagaatactgtatgaataagagtagttaagcatgtagcgcagctagtcaatagagtattagcatgcaatgttcgatcttggtattgacattagactgctaaatgggcaaaatgcctctatttcatgaggtaaaaaatctccgactatgtagtacatctctgagacagaaaaatgtttattcttgatgtcatccatagcattctggagattgcattggcacaatatggcagtgccagtttcttcagcatactttttatctggctacaccatcgactccaatgctcgcgtcatgcacgtccgtgacgccactcctgctttttagatgcacagcacgtcgagcgcgtcattggtgagcacaagcccagaggcgatttcaactgaggcttgaagcggcctggaggcatatctccgacatgacaatgaccgagcttggttaagagcgagcaaaccaagagctaccaggagatccaataaaaaggcgtacatgtaagtttgcctaacggtcaatctcctatagtctcggtatattccagagtaattccgagtccgacggcaaaccgacatcatcgtccagtctgaggcctgcagccaaagaaccttcttccaagcatccaccactcacaatccccctaattgtaatcagcccagacatcgcgccaatcaccgtgactccattcgcaaagcctggaccgctgtcgcactgtccattttagattggagaaaggatcttcgagggctgactattaacggagatgtgattggccggcccgcagggagacctgggccgtgtgttttggaatagaagaatgtaagatttttaccaggaggtgatggatctcttataaataagaaagagctaggcctcagaaagagtcttcctcatcgatcatccattgctatttaatccatcctcctttgtaaaggctcactgtgtgctggataattggaagcttatacacggcggaagtctagattgggccatatatctgccgacctgacgtcagtgccactgccggcatttttgcttacttccttcctctttcgtcaatcggatcgacattgtaaagaaaaaaaaaagcgtttctcatacttcgctatcatcctcgtactctcttccttcaacaacacatcaccatggcgctgttattcctgaaacaaaaattatttcctggtcaagataagcgttccgccggtaaacttggtacgtcttcatccacaatcacttggggatgagaataaaagctgatttgtgctcaggaaaacccttactcgcaccagacgactccactctcaacagcgaccaggatgacattgaatcgcaacgatcctacagcaccttccgtccttcatctcctacttccgagtcggggagcaccagcagttcgcgctcaaggatcaacccgcgcatcgtgtcggacgccatcctaggtctttcggacggactcaccgtcccattcgcactgagcgccggtctctcagcgtttggaaacacaaaagttgtcgtcctaggcggtctcgccgaactagcagccggtgctatatctatgggcctgggcggctacgtcggggcgaagagcgaagcgtaagtttttccttatagaatattaagttacaataggatcgcagcatgctaacgaaagctgacaaatagagaatcatatgaaacaacagtgcgcgaaacaaaagaactcattgaaacatctccctccgaaacatctatgattgtccacgatatcttttctacatatgcactcccggaagaagccatttctcagattaatacctcactgcacgcctctcatggccgacttctagacttcctcatcacgttttatcataaggagtccgagccggattgtaaccaagcttggatctcggctattacgcttgcgctgggttactttgttggtggatttattccgcttataccgtacttcatcttcagtcaagttattgtcgctctttactggagtattggggtgatggcaattacgttgctggcctttgggtatgtcaagacgtgtgtggtaagagggtggcagggaagagagaacattgctgcgggcattaagggtggagtgcagatgtgctttgttggtggtgtcgcggcgggagctgcgattgctctgctaaggatgttcggtggtggtgcttgagtatctttggtcgtttcttgattttatgagcataatagacagcgacgggcgttcaggaggggaaaattaatgatgatactcgattctactaataaacgcataatatccaatagacatcacaatataacatctccacttgaagaacataccattgaacaacattatatacaataacaagagaaagcataaatttagcctttcaaagccttcccaaccaagtccttcgccctctcagacatgtcaatcttcaaagccaaattgcgcccctcatccgacatcttagcccacgtcttcctcaagatccccaagaccttctcctcctcataccccttctcaaactcctcaaactgatcatccaaaaacaccaaacaagccacatcttccaacacctgtgtctccgaatcactcttcaaaccctccttcctcaccaacgccgccaccctccccgcctcctccgccgaatagcccgcctccaaacaaatcccctccgcgatctccgcctgcctcttctgcaatccactccgccaggaatgatacccgattttggtcataggatacgaagaccgcggcacctcccagcgcttgagatgctgggcacgaatagcgagacggagggtgtctggcgcggagggacagcgcagggaaaggtatttggtcattttgttggcgtagtggagttcgtagggaattggtgtgggggagtccggaggggtgatggttttggggtcttgcgcgtgcgcggcgtcgattagctcgagggcttttgtgtatttgtccattgtggctttggtgggaagtaggttcgaggacgaggtggttgttgttgtggttgttgagtactctgggaggttgcggtaaagtgggatggtgataatgataaatgttacggattggggtgataagaaatccgacgttaaagattggttcgtttggagtgttccagtggttttttacttctggattgaatttaggttttgtttggttcgccccgcgcggaattattcgattggttcgtttttcttgtagatttggtgtgtttttgattggtgggtttgcaatgtatgtagtaagtagtccctgtacctggtttttgtttagtggggaattgttgttgttgtcgtggcatggccattgaggttgctgatgctgactgccagaggcttgttggctacttatttggcattcaaagagcaactgaaaattttgtcttgcctttgcagaaatccgatatctcagcagattgtctacttctaatttagcaacggttctagcacatccaaatccatctcacatggctatatatacatatccctacaacttggccctcacttgttcggcagcagctttcaacgatctccagtattgatctttcagacccaaaaccccgaatcccaactcagcccatttatcatcccacggcggcagctcataagcagttgtccccggcgcaggcgggcccgctaagtcacggaggaaatcaaaatactccttgaagtcaggcttaatctcgtggaagagggaactcggacccttatacttcaaccgctcgacctcccacagatcctgctcctgcggactaggcaaagcgtttgcattccgaccggcgaaataccgtgccacagcgacagcctgatattcatagacccggaagctaatggccgctcgcacctggcctaccagtgctaacgacgggtctccgatcttgaacacatgttggtagaacccggctacgcggttgttaggcgtggtaggattgggactgaggaacggataggcgagcttgaaacccgttgcgaatatgagcttgtccacgttctcgacgacactcccgtccgcgaagatcacattgattcctctttctgttgtttggacgcgctcaatcgtcggctttccctcgacattgggaaggtcccaggcagcttgcaaggcctcgtttttgcctcgtagggagagatatagtgggcccttgacgatggggtgtagatccgctaccagatcggcggaggatatgctccctccgaccacgataactttcttatcgacgtaatcgttcgctgagcggaatgcctttgagtgttcgaacttggtaggatgggtactagcggcctggtccaaaccagctatgtccgggatccaggggacgttgtaatgtcctgatgcgattaccacggcatcgaagtgttcttgccaccagtaatctgctggctggttattgtgaaactgacctcgtttccggagcgtgatggtccatttgtcatcttccttttctactctctctactgttgtattgaaagagacgaggtgaagatactccttaaagaggtcttctaggtatgaagacacaacccggaacggacgggagggattcgacttcccatattgcctgactgatagggcggaattgacctctggaaacgaggaatgtgtgaatgccatggctccagccccgacattgctgtcaagggtgtcgtagatggctgtgcgcgctgttgtgtcttcaggtactgggggtgtgaaggttgggaagcttaatggaattttgctctgcttcacacttgacgaagtagaggtcggaaagggatcggggattgggtcatagtgccagagacctccgactcggtctcgtcgttcgaagacgcgaatggtgtcgaagatcttctcatcattcaaggctttgacggcagaaacaccagatggaccggtgccaatgactgctacgctgcggtatcggggacccatggtatggtaatttaattgagagttaatgaaaaggtccaattggtagtttatgagaaaaaaaagaaagtatccagacattctaatccatacacctctctatcgcccttacttatagttgactgacacctgcactatttcccagtatccgttgcgcaaagataccccacagtttcgacatagtaactaaactgttcgaacggttgtcgctcgattgttgagatatcagtgtttgaggtgattggggtttcggcgggttagcctgacgtgattcgcgcttagtatgagctttgcatccgtggagggggatgtcggcaaccagcgtgcaattgagtaacaggactggtcagttaatgctaactcaatcgcttatttcttgtgtcacctgaattattcagcctttttgttgtgtgtactctcaacgagcagattttatctttctcgataccgatgtcgctaccaagtggaagagcgatctaattcttatcgggcaattttcgtgccagttctcaattatctttctagcggactttgtgatattgagtaactattgacgaattatgtacgtatctctgatcatatgttcaatcatgtaagcactgacggatttaaaactggcaggttcagcatccctctagtccgtggaccccgttgtcaatggtccacttgcaagagcctattccaggctcagatgcattcttcccctgatacaaaaccacattgtcatagtaaatatcataacaaggatggttctcagaacaggtgacagttgaagtcacctcgccttcgttggtaacatagcccgtgcaattggcaaaagtaatgtcagaaacggtcatcagactcgtaccagagtacgagccgttgtcaccctggttttgattgatcgtaggacctatattggcaccctgaacctcaaagttcgagaaaatgagattactgacattgccccagccgccgccgcgggggagaccggcactctcgtaggagtcctgcggggtggggacgccagtccatgtcttgatgtaggcgctgccgtgcatgtcatcgttgtatcggatgatctgttttcgttactagctgttgatatggcatatatccatgaagaaggaggatacgtaccttgaccttgtcgattcgtacattctctacgctcgagtcttctttatattgacccaaactgccgatggcgatgccattgccgccgcgacaggtgacgttgtgaatatcaatatcgtaggatctgggtttgatagctatgcagtcgtctccgccttgatatacgaagttggtgagacggatgtttctcgcgtccattgtgtctgtcggacgatacgtgctagtctatgcacgttgaaatagaaagcatagctttaattaccaaacccatctgtgttttgagcccagttctctccgtaaggtgcatccactgctgtcgcattgcatgtgatattgttaaactgtatattagtgccgttcatgatattgagggcccaaagctgcgggtccttcacgtagaaattgtcaacgtggacgtccgagacgttccagaagacgaagggcatcgatcttccgggctgagtgttacccgcttctgcggtataccagacattgccgttgccatcgatacctccagtgccgtatccatcgatggtgatgttgcgtccggtgatcacaaagcccgcagcatggttctggaaagcaacagggtaagagtgattgctccagtaatctaaatcatcagagaactgtaggggagaggtttctgttagttgcacatggtatggagtgtcaaatgcatggagagtcgcaccgtccatttcccccgccattcaattgtcacatcactaaggattggattcaagcgcgaagcgatccaatacgactggtcttcgcggaagacaatggtgcccccgttgccacatttccgaaacgcttccaggagtctcggcacatcgtccgtctgattaccattcgctttgaccgtgcagatattgcccttgcggtcgatctgggacgcatggctgatagcagataaccctagcgacagggaaaccgcgacaagaggagtactcagccaacgcattgtcggggatattttcttgaaaaaaaagaaaattatgatacatagcccccaccaatgtttacagactactatactgatcacgtatactttctatttatcgctacatttcgacgatatcgatcagactttcgctaaactttcagtggcagatgtagcgagattcttcgatctgcgccccagcacgaagcatgttcgccaaaatcgcaaaaatgtggaggaggatcggcttctggaggaagaggaacgatttcgcgtctacggatgtgtcagtcgctgccccaatgggaaattctcctgacagaagcttgtatatattctccgccaataatgcttctcggtagaccataattacgcaactactcagatactacccccggatggaattatagcgaggaatagaaggcacccgatgaaggaatagatcaacggtgcctgagaatcgaatccttcgctaaatctttcagtacgtcgtacttggctgatgtcattcctattgactccttgcctcccctagaaaataccaggaattctccgagaactagggagaaattaggcgaaaagaggaaaagagtaaaagaggaaaagagggaagggactccatttgtctgaccattggattattgagggtccattactgattcagattaatattaatactactgatattcataactcgaagagagttgaggaagtggagccaaacgggacgctaattgatcgctggatgaacggtttgcggccaacactttaccgatattgggtaatccggggacaagacccaaaaaccaacccctcttcccctccccttgcaaaacattccaacaccgattaggcaagcctctaatatagaagtcagcccgacaagttgagtacttaattccacgtatccgccggacgaaaataaaacacacaatgacttgtttcgtgcggtgtacacactctccctacttttcgacagggtaaaaaactgctgctttccctttgggcattcattccccattgaatggcaaaaatggctttggggtaccgattacctctcctcgtgagtctgctggcactctttcaatttgctctggcgcaaaaatgctggcgaaacgtcacatgtaccggaccgaaagatagcgcctttccagggctgtgggaggaaaatatttacgcgccatcgtccagaactgtcagccctaagcggaagatcttatcactggccagaccgaacgccacggtcgattatcaaaagtctaaaccgtacacgttgaacggcaatggatcggcagtggtgttcgacttcggtatcgaggtgggcggcatcgtcaccctggattacacctccaaaggcggcagcggcgccttgggcttggctttctccgaagcgaagaattggatcggagaatggtcggattcctccaatggcgcttttggtcccgatggtgccctgtatgctaatttcacgaaagatgggtccgcgtcgtatgttatgccggataagtctcttcgtggaggttttcggtatttgactgtattcttggtcacagaggaccaagtctctgtcgatgttgatgccgtgagcttggagattggcttccagcctacctggtctaatctgcgggcttatcaaggatatttccattccaatgatgatctcctgaaccgtatctggtatagtggtgcctatacgctgcagaccaatgccgttcccgtgaatacaggccgtcaggtgcctatgctcaagaaaggatgggccaataatgcgacgatgggacctggagatacgatcctcgtggatggtgccaagcgagatcgtgccgtatggccgggcgacatgggagtggcggttcctgcggcgtttgttagtactggcgacttggaaagcgtgaagaacgccctgcagacaatgtacgatactcaggtatgtatattccttctgcaaatatctatcttttgcatctaacaataacacaggataaaacaacgggcgctttcgacgaatcaggaccaccgctgagtcaaaaagactcggacacataccacatgtggtccatggtaggaacatacaactatctgctctacactaacgatacttcctttctatcgaagaactggaacaagtaccaaaaggctatggactatatctacaacaaagtagacaattcaaccggtctgctgaatgtcaccggcacgcgcgactgggccagatggcagcagggatacaacaacagcgaagcacagatgatgcaagtaccgcccaccttccacaagattcctcttatctaacaaatactagactgtatcataccctaacaacaggcgcccagctagcctcttgggcaggctccagcagcctcacagacaaatggaacgcccaagcaacagacctggtacagtccatcaacgagtattgctgggacgacgaatacggtgcattcaaagataacgccacagccacagcgctacacccacaggacgcaaacagcctagctcttctctacggaatcgttgacccagacagagccagcaggatctccaagaatctactgcaaaactggaccccaatcggtgcagagacgcccgaactcccgaataacatctccccattcatttcatccttcgaaatccagggtcacttcaaaattggccagaccgccagagcactggagctcatccgacgtagctggggctggtacctcaacaaccccaacggcaccgagagcacagtgatcgagggatatctagtagacggttcatttggatacagatccgaccgcgggtacagtcacgatccgtcgtatgtttctcatgcacatgggtggtccgccggtccaacgaatgccttgacaacctatgttctgggtctttctattacgtcgccgcgcggcctgacgtggaaaattgcgccgcagttcggcgatctcaagaccgtcgagggcgggttcacgacatcgctggggaaattccaggcgtcgtgggataagagcccggatgggtacacgttgcaattttccgtgccgcctggaacgaaggggaatttgacattgccgtatgtgaggagctcagagaagccgtcgatcacgattgatgggaacaatatcaacaagggcgtgtactatgtcgatgatacggcgacgattaccgtcagcggtggagggagtcatagagttgtagtgtcgtagagcattgatctcgtaaaactggttgctttctataatgtccatgtataactttcgctccaatgccaatcaccattccatactacgaaccatctcaactcacaccccaacaactatatcatagtcactaatacccccaaaataaaacccccacagcaacaaaacaaccccagctagtcccccgcaaacaaacatccaaatcaccaaccacaaccaagggcaacttaaagtcacgtgaatcaacaccaccgccaagccaaccaaagatagccgttaacctacaacatccgcccatccgcaacccaaaacaccaaaccacccaacaccaaaaccacaatgcgacccccaacatcaacaatgcagggcacacccctgcgcgcctgcacacaatgcatccgacgccaatacctccgtccaacaggcgcaaccccgacccctcaacgcctgctaagcacaacccgcgccctccgctctacacctaagaaccctctccgcaactctaccagctcgcgcgcccgcgaagcagagatcgcgcgctccaaaaacacaatgacgctttctgcggcggggatagtagcctgcgcggcggcgatgtacggggtcatcaagctggacgtattcggacttgaccaggtctctcctaaagaagaagaacacaaagtcgaagtccagaaagagggagcaatgaaactagacggaccagctggattcgggggaaatgcatcggtgatacgggtacagggacaagatggtgcggaggaggtgtccacggggacgagcacgattcctacatttccgagcgtgatccggttaccgaaggcgattgatgcggggtctttgaaggccggggatgaagtacccgagtctgtcgaggaagaggagtatcagttacttgggttggggattcggactgtgtcgttcctcaagatccaggtgtatgttgtggggatgtatgtggccaagagcgatatttcggagctgcagcagcggcttgtgcggacggcggtgaatccgcctggggcgaaggagggggttgttgatacgcctggggcgacgtctgcgacatcgttggtttcgacggagagacagggattgaaggagttgcttctggatgcggagcggggggatgaggtttgggatgcggttatccggggtgatgggctgaagactgcgttccgaattgtacctacgcggaatacggatttcttacatttgcgcgatggctgggtgagggggattacggggcgggcgcagaaggctaatgcgaaggctttggagggtgcgcagagcgagttccaggatgagtcatttgggactgcattgaatgactttaagagtttgtttggtggtggacagaggaagaatgtgcccaaggggcagacgttgttgcttgtgcgtggtggccgtggggaactggatgcgcttttccatccggatcctgctaagcccgtgcggttcttggggcgtgtgtctgatgagcgaattagccgcttggtttggttgaattatcttgctggtaagaatgtttcgagcgagggtgctaggcaaagtgttgtggatggagtgatgggtattgttgaacggccggttgggactgtcgtgcagaagattgtgtaattttatcttgtatatgtaatagtaggcaaacaatcactctcactcttctcagattgaagtctatcagtctacaagtacgacacatactaattccagacaccaactccttagcggtatagaactcgagactacaacctccgccaacccgatcaaacaccgaaacccaactcaccaatctcaccatctacacaaactctcttcacaaatacctttagcacagacgcctacagaaccaatcacctcacccccaaccccaccaccatgctccgcggggtaactcagcgactacaaaacccgaacctcgcccaccaagatcaatcaccgaacccacaccatttctagaaacccacaaggaaatcaaataaacagatgcattccgtctatggtatacacaatgatctcagcgtataatctaaagagcaccagcgtccttcagcaaggcaggaagctcgcttttgcgagcctgcagatccgagtttccaccgatatgcttctgcttgatgaaaatgttggggacggtgcgctggccgctgatttccacgagggcgtcctggatggcgctgccatcgcctagagataaggaaaaacaggattagtctctataaggtatcatcggggctattatagcagatataattttaattaaaaagcggccgggggctagacgtactctcttcatcgagctcgatggtgaggtactttgcgtccagctggctaaggaggctcttgctagatttgcagtaggggcagtaggacttggagaaaacgactagattggtttttagtcttgtgttagaaggtgtggctttttgtttatctgtgccggggtttgagcttaccgacggcgttggcgttgatgatgccctgggctttgatcttagcggcagacatggcggctggagtgggaccggcgaaggacccgaagagacgagtgaagatggaagaaatggtgggcaactgggttctccgatggagaggatattggaggggagattggaggggtggagcagggtttatatacagtagaccggacggggagtatacttgtgttacttgcgatttcccgcggttgactaatttgtccggcaaatgatgttaggcgcggattatgtaagatgactgcgcgatgatgtcgattcgggcctcaggctcacgattaccaatttagcactgctgctgaatactttggtactcggagggtataacgtctattactaccgatcaattctataatactcagggtttcttggtatatagatatatttgttctgtcagttcaagtaaaactgctggtcaattgcttcaatagctgtctctcgaccctcgcttggatcggatgtaagtcgcgcggaactggtgctgggagtttttaatgcaaaggaaatgaacaagagaaaaggaaatgggaataaacctcaactgtacggtcaaattagtcaaatcgaaagagaatcgaaggagtgcatcgtgaggtcgttatcaaagtatcccccccgctgcttcacttgtgtaagacccaagggttcacggctcttgacctgggagcttgcagagaccacgagtcaatagtattctttggattgacatgcaaggaaatatgaattacaacagacacaggggaatcatgcaaggagcgactagccacaacgcaagaaatggaaaatccggatggaacgacaataaaatggacagataattaaaaagagcctaaaagcagagcactggtgatcaacaacaaccaacctgacacgctaaccgaaggaatataatgcggaatagggtaaaaattccaaggaggtaagattaataataagtcgtcatcaaagagacgaatagcttgggaacgatgtacgatgtgaaacatcacatcacaatgcaacatccgcaacccctctcctttggcggcggtggctctgccgttacaacgggcggactccatttgggtgtcagtgccgcttggggagccgcttgggaaggttcttgcagtttgggcataggactatatcctgtgcctgtatttggtcgggtgatcgggtctggagtcttcggtgcgcttggtggttcgggctgtggctgcgaaggcgttggttcttctttttccttcggttccttcggttcctctggttcctctaccttctcaatgttctccacaggccttggaccatcatggccaaccgctaacggagcaaactcgcgatcatacgtagttggtgtcttgccctctttctcccattcctcttgctgcatccgtttcgcatgagtgggcagaatttgctgatctgggggtagacgcgggtctggcttgtacatggtcgccagccacggggggtctccttcagggcggttaacagcagttttcggacgatcacctggtttcccttgacgctgaggattgttattggacgtagtacgacttcgaggcggaggcctccttgttgacgcaggagcggatgttttccgagtcccagtgccagctgcacccttagcgggcgtcttcttggctgcgttaatctgggcttggacaccccgactagcaggccggctcccagcagccgggggcgatgcatctgtcgaatctaccgtgataggctcactagccctacgaggcataccgaacgacagggtctcctcatcactaatagtattcgcacgcgagcggttcatagacgcggtgctagtagtgggaatgggaattcgagacgagctcttccgaagaccagggttgcggtagatgctagatgcgccgtcatccgccgcgatctcgtcaggcttgcgaaggtcccagttgccgcgtgcgtcatgatcaagaccggtaggggagctagtgatatctcggtgcccttccaggtttggccagggctccatttgctctatcggcggcgtcgtaacttcattgtggtgcatatcatgattcctcccacgcccagaccttatactccctgatccgactcggcgctggaagaggatctgctgcagctcttcactttcgattttcgctagtttgtcacgatggatccagtttgtatcgtctgtgtcttcagggcatggtccggcaccttcttttaggtcactcttccttagagatccattatatgtatcctccgagttcctgacgttgccaatgctgcggctggccgcatcctgtccgtagacatcccgcgaactcccagcttcgctcccgcgtcggccatggctaacatcccttcgtcctcgagaattcatatatcctaactcatgtgcgtaggcatgctttgacagtgaggagctacgggatcccctagaattacgtcttgatcggttggtggactcgtatgaagaccgggacttagaacgacgaacggtactctaccgaagattaaggttagcagatagtcatacctacaagtaagagtggtgggagctttctatctcaaatgcacaaaggccgaaaccggtggacaaacatgggccgtataggacttacatttggtgtaagcgggaccgaaaactcccactggtgctggttcgaatctacaccggacgacaaccaaacatctgaagaaaatgctgctgctgccgctcccgccattccaacagcaatgaatttaactcaaggaaacaaggccagtccagctggaaccaagttgagggtacaggtttgcttgtttggtgagattaaagagaatgaattcgctagatttctccccgatcatgccatcccaatgcgtgcagaacctaagcaccagccaccgggcacctttcctccaagatcacgaagtgcaagccgagcagcgtgttcggctcagagttgggaggtggtcggggggttgaggacactgcgggcagttgttctgccgatggagaaaagaggaagtaaggaagcagcctgaaagagtaatgtgtaaataggggatcggcggagaatagtacgtcgagggttggggctgaagcaaatagttgaacggaaaaccggcggtgacagtaccgtggatgcgtttcggttcagggagcgggatcagccaacaattgatgatagtggatggcacaagattcccaagtcagtgcacagtatagagtcccgtgtaatattgcagacgaaattagtcttcaacaggaaagacagtcaaagaaagagtgaaatgacagtcgcacagggaatgggacgtgaacccgtcgaggggcgaagagaaagctggaaatgaggggaagaagaaaaggaaaaattaggaacaaaaaggagtgcgagccaaccagggtgtggctagactgtggcgcctgtaaggtcagttcagagacgcacacgaattgcaaatgatagagagaagaacaaaaagcaataaaagactatggtcaagaaaaggggaggagaattagatgtgaatcaaattattattagtaggaaagtaggtatggaacttaagaccctccacatggaacgagagtcgggtagacgaacgaagaacaaatggaatgaacggggagggaaggaggagaagaaggggcggagaacaaaaaccacagagaagaaagagaacgattgtgatggggcacgctatcactatgttggagcttagttaccttttggcgggtgtcgactaaggttctttaggctaacagcctaacgactagtcacgggcattcctggtccccagccgaaacagcctagaccttcaagttaaatgtccaatggatcaaccgtgtcaatttacatctatctgtggtaaggtttactgggtactttctctatatagcatggacgataggactcgaacacctcgagtcccatcccagccatgtggtccctcatcggcactgggttctcgcgcagcggcgcagttgatctctctcaaaaccgtttccacttgcatcgtcggctgtgcccccttttatccaccgccagaccacccgtgcattccgttgcctcacttcggtaaaacatttctgcatcattccctgccctccttaatgacgatcggtagccgataaagtactccgggatcgatcaatcagaaaatccaattagagttacaactctttgtctgcgaagtactaattccatggccagatttggcaatcaatatctcggcagcacagatgcacaggtccttccaattttagtcatggaaattgtgtacctatgtatgtatgtatatatacggattatgccgaagtaggagacgtctctcgtcagccaacgtcaaccgatgtggctgagatctaatgacattcactaggtgcatcagatccaccttcaatttccctgttgaagccattcactgactaattaatacgacgtgaccgtcctctttgcaagagcagttaatgaagtattccgacggtacacttactctacccaaccaggttgctcaaaccaaggactgtggtgattgtaccaaacaagaatcttactggttctggctttacgagaaatgactagatacccgcaacccactgaacaacagggtttggcttgggaccagtcaacaagaagtgtagattctaaagtttcggcaaaacttagctttgggagaagactgaagcctccaaggattttacatttaaccataagttgagcatgacgaacgcctaattaagtttctgcacgcggagaactattatccaaagacgaaagagataggcccgggatgagttggcttgcagtagaggctaactctattggacttcagatattcattgccagagtagggacagtcttcattgatcatcaagagcttaggcccacgtggcatttgtcgagtagtgatttgattgcgatcgacagtatccaatcatacaacactggatgatcagaataagtgctgaaagctatcgaacagccgatgtaagatcttccagatacacaaccaaaaggggtaagtgtcataaaaagaaccaccatgatatatataatgaccactgtagcatggtagtataacgcagattctatattcgtatcgagcaacaatatctgccaatatgttcatgacatatacaatgatgggtgaggacatcaagcgattacttataaaggtaaattaaaatgtacagcaaacatcgaactgatgagacgctaggcaatcatgcctttgcttggtctagtttggtgagggtggactgcgcttccttgacgagtgccttgcgcgcatttcgagcatccacattgccatcgggctcaatgccatctgccctaagaatcacttgcgccaaaatcgtctcacttaacttcgcatgttcaaactcacgcgacttgggatcggttggggtattggcaatatattcattgcaaagtggcagcagctctctttgaaagtacgctgaaagtgcctgtgcttgctcaaatggggtgctgaaggctttgaggttgggagccggcgctggaagtgtcgatctgctgggggacgcagagggtttctgatcggctggcggcccgagagtgtcagcaccatctttgttctttttcttattcttgttcttcttgttcttattccggttgcgaaccctcttcgggcggggcgcatcatccggagccgccgagtcgctggccttatcttccgcgtcggacccctcgctaggggtgctttctcccacttccgataccacgcaaagcacctccgactgttgtttgagtccctcatcccgacaggacagttcatcgtcgtccaaaagcttgcccttgtaaagtagcttgacccgctttgggtcgggagcgcctgtcgcttccgcagctcgtcgcctcaactcgcgaacgctgagcgtcccatcattaatggcgtatgctgggaaattgagctcatatgcgttccttttgtgtttaaggagaagcgtgtctggcgcattgtcgtcttgattcccatatgtgcctgccgcaccgtcgacgatataactgtaatcgctatcgctgacttgcggcgtgttggagacagtggaatactgtggagagcgacggaagagattaccgaacggagagcgccaggacatgatggctacggctagtgcgcaagcaaggattgtaacagcgagtgtatgcttgtcggcggcgaaagtgttctcggtgatccaagtcggtgggggcccaagggagcgcaaagacaaaggcgtttcagcagaaaaggttgcgacgaatttgtcttgaatggtgttgagggaagtaggaaacttgtttttaaagtaagttaggtagaatgcacaagtctcgcccagaaaggactgagaatcgtgcgacagcagttgggtcatcaatgaattattttaaaataaaagaagaggcaaaaaaattgagcggtggacgctgaggtcattaagggagaagctgtcctctcaactccgaaataggcaaacaaggcggagagcccaggcggacattttgccgcagtcactcctcattcagtggagcagaacataggctactctacctactatcaacttgggacgaggtcaggcgatagttgcctggcctgagtgagccttgttgggagatttgggagacttgggtaaattctggggtgaatcgaatgttctgcgacaacgatattctccctgttctacatgaatttcccatataggtccaacttcactctccactgtactacagtcatacttttcatatacggggaacccagacaatgcattacatgattacaatgggtataaatgggacatacaaacatagtcacaatttctattcgaaggattcaaaagaattcgaagcaaacttttagcgtttcattgttatgcaaggctggatgattactaaagccattccgtgctacgtagccgatttccaataaaggagaaagaaagagcccttggccaatgttggacaattatattacgatatctttttgagtaatagaaactcttgcttcgatacaattgtggcagcagcggtattcatagcacctgtccaatcataatggagggtatagtgacaggtgacagagtaagtgacagagcaaagtactactagtaatgatgtgatgtactaagcacattgagatgtccttatgtggttggcaatgagatagcactccacattgacaggcaacatgtcaaagctacaataacgcatatctttgaacctttcatattcttatgtgcaatggtcgtcctgttggactgcccccctcggtctctacatttgaatggccatatggtttttaaaactcaatgaccctcgttttgcaacaggcttccgggaggatcagaaaagtaacccctggactccacctggcagatattgaacagcagtaccagtaattagtcctgaaaggtgacggatttgctgaagaagatagttttagtatcgcacaggatgagacatacctctatacatggatgcgggacttctacgagacagaattgaggtatacaataccttaaaagatatccaaggtgaacacgtgcctcaacagcttgcatgtgttgcattgcatgggtcatctctgctgcacgaggcatcagtcagcaaatacactgacatccctggaatccttttgcaatatattgatgagtttcccttgaccgatatcgctgcacatgctcctagagaagcctggcagtcactctgtgaacaagccatctgcatcgttcaccatatcagcgatcgaggtattctcaatgaggatgttaaaactagaagcttgaccatccaaatcaattccgagggaatgttcaagatgtttatgcttgattttgcgctgtgcgatttccatagggactataaaagtgaggaagagtggtggggatggaaagcgacacaagatgaagaggggggagtggatttgtaatgcagagcaagttgcaagggggtttatttatcatcgatctgctttgtatacaaagctggataaggactacatgccaggagattgagcgctatcagcacagccttcttgacggaattgtttgatactatgataacaacttgtatgaatggggaaatccgctttatcactaagttcgagctttttcggactcattatccagggtctactcataaaggatgcaaaggaggaacttgagtatatatacgtaaatttcgaacttatgatacaaaactatgtcatatctatttccaacgccttcgtcatgcaaatacagcgaatcttcacagcctcaccccaccaggcgctggtcgaccaccgaaccatctggcgagcccgttattgccctcgttgccatcacttcccatccaccttggaagtcggaacgagtcgccctgcaaccattgaggtgtaccagcggtttcaaacgtatttttcacccggtgagcaaacgattggaaaaagttatcatcttcttcttcctccgtcactacagtggaggctgtggcggctccacgggatggccgtgaaggtcgggtagcctcaccccgaggggtccgcgacgaagaaaaggcattagtgccttcttcgacacggctggaaggctgaggagatcgatcacgagcagagagcgatagggacccaaggccggtgagctctcgctcgatcagatcacgaccttcgcgccagcctcctagaccataaccactagggttgttttccaagtcttcgtcctcctcttctaagaggccaaatccgcatatattcttcacccggccatagagattgaaaagggtagcacagaccggtgcgagaatgaatatgggaaagaaataatcaaacccttttccaagcggtgtcaagtcaatggaccgcccgagaaaacggtaaaacgtggtgttctccctggcactcatcggtaagaatgttacaaagttgtatgcgatcggcacagttagcctagcgacgagccccgcgtaccagcaagcgctttcgccgtacgtgttgcggcgaactagagcgcgattgccccacactttagcatcgttgacaccaactaacgcagcccagcacatgtacaacaaccaagcagaggcagtcacttgtcttccgaagcctacgggtgctggatctttgtgataggagactatggagagagtcacaactgacaaccggggagcccatgacttaatcaattctgaccagataacacacagagatgcagccgcaaagatcacgccgaaaagcagccggacgctcgggattacgtggacgtagagatggtgtcgcatgtatggattcagaatcttttgacgtgtaaagaacgttgcgcgatggggggcgtgaccgaactcgagcttcttcgatgcagatgagttgatgatggcttgcaaatcggcggccgtcagcactaaacgatcccactcatcgataaagcgggccttcagatgccgagcgcgctggagtcgtctagtaagatctgccatatagcgctctgtgatgacagatggaatcgtactcgacacgtcggaaggttcaagaagtgcggtccgttgctcggaggagttagacgtctcagccaggtcttcgatccagtccttgaactccaaagcactgccagtcttgcgtcgttgtaactgagagacttgcgattcaagactctcgaggtcggtgatcgcgtccatcagacggtcgtgcaaccggggcgcataagcttggattctgcgcagtcgaccgctcacgttcgcattgcggaatagagtacgaggtatggaaacaaggccatgacccatcagatagatcgcaaggacaagaccccatacgtacgcgagagccataactagtgcttttatcgacgtgaactcgaacccattttgaattgatatgtagattaatcccacaaccgcacagcacagcacgataagttgatatcgggcattggagcggagggagtattcgatgcgacctttcggctcgcggtagccggagtcgacatattcaccaagcaatggtagaatagccctataaggaggccggattagtactgaaagaacatgaaaaccttacaattggtcaaatgaagaaggcatgtagtacacaccaggttagcacaaagattaaccagtaggcaatgcgccaggataccaggatcaaacggtcaggcaaccaaatggccctgggtccgcctccatcacgcgagctcgatgctagatcaatcgggaccaggagtactacgctagcggggagggcgagcgcaagaaaaacgggaatcgtgaggtaagctggagtagctcgcaaggtcaggaaacgccgtagaagaagtaagacaaggattgagattgccaaaagggcaaaagaaaagaagatattagagccaacagagatcgaagttatggagatcatgacggcggtttcgtggagtgtatagactgcatacagaaggcggaaggggaattcagggtcttggacaatcaagagtaattgttcatgacgagggaagcaagtcaactaaaagagcgactatcaacctagctaaaatcgcagacagaaaagggccggattctgttaaaagaaggacacatggaagtgcaacgagagaaacgggagttggttccggattgaatgaaccctgagactctggaggcatggacggatctttcatttcgttgacgcggatgataaggcccacggtgacgacagcagggtctacacgtgacatcacatgacattctgttgctttttctggcaacaagcagccttatccggtccacttggtgcagacagtgtatgttacaggaagtcagtcacgagtgcctggagtctgctgaagtagtcaagctgctctctctatttacatggattagattcctgagcagtattagcatctacgggagaggggtaccaatagataataaataagtaccaaggagggactgactagaacgtagttgatggagcctgtaccacctttgggtcggtcacactaggtatgtaaggtcacgggtacagtaccctaagtacagtacctgcacactgtggactgatagactgcaaccagccttcccctaaggcaaaaaaagaaagggaaaaaaacaaaaaaaagaaaaaaaaaaaaaaagaaaaaagaaaaaagaaaagggacaaccaattaataatattcgtactattactagtactccgtagtatgatacaaccacatcggtgatcattgatctgttaggaagaatcctccacaccctaggttggcgatcaaatgagcttcacataaggtgtataattataatcgtccttctcattattaagaagagatattataaaactcttttgaataagaaaggggaacaagagagagagagaaattaaataaaaataaacctaaaattaaaagagtgggaaccaaaaataaaaagaaaaaggaaaaatttaactgggaacaacgcaaaagtagtatgaaatggaaatgatccaaattaaagtacctgtgaaaccagacgtcttggcttgccaaaccttgcgtcctctccacaaatcagtactccagtatacaccaatgaaattcccatcaggatccaaaagagtacgtatgtgaacagcgtacagctcaatagatgccctactcagtgtacaccacttgaaccctataccactagtctgtctactagggaccggacaaagtcactaaggactgctggcccgccttttcgtctccatccgctcccgtcactacacctcctgctaacactaactagactaacttcgaccagtaacgggcagatccataaaggtctgaaagtctagtacctgttagtcccacactaacctaggcctgaggccaccatcaccacctgcctgcggcctttagactttccctcgtcttcccaactgatcttcagtatcttctgctcatctctaggtcaaatcaattaattcaatctttctctccccttgttggctatattggggttcctatttttcccattattgcttgctgcctttttttttttcttttcttttcttttcttgttgccctttttgttctattttatttttgttctattttatatttcttcttcgaggggtaacaacatccttccgaacttttgttttctcgtctcctctcggttttcgggttcctctttcttgcgaatttcccctctcttcttccggacctcttcaacagctgacggtcatcatttcttccataccacaggactagagctctcattgcttgttttgtaagcccaccctcttcctactgctttctacttccccctcccctctccgaccgatcgttctcccttcgttgcttgtgtccaattgatcggtggatacctctatcattggtgtccttttttttttttttttttttttttttttttaaaggaaacattttattgtttctggcggtgttgaaattacgttcgcattacgatccgtctgacccaaaccttttcagattcactttaatccttcgtttctctttccttcacctataattttttttccctttttttttttctctctttttattccaacccccttaccattcttgaaattcttccggggcggatctcataaaccgaactcgaacgcatccgttctgcaacgaccggcgtcagtgcgacatccctgtcagtgatccaaaccttcgccggcttagtgttcccccccaaagccacttcccggctcctgccaacgaacccgctttgactgcacgctggtgcccgaacgccttgttttccctgttgtgttggtctcccgtgttcttgctctctcttactctctcactcaacgctctctttgtcctactgctatcctgtcttgcgcttgattcttttcgtatctcagcgcgctcaacctccgtacggtgttacgtcccaccgcgattcacttcttggagttcggacctccagtgctttccttccgcatcccaccactactcgctttccccaccatcctaaatcacgccgctaaggaaattctgatattgtcgatccgggcataaagtatcgcacagggtgagggttggtgttcccaccagcgaatgctgacgtcaaaagaaagcttgcgcggactgctcctcgatccccattaagggggggttgttgacatgaatcccgcaaattttcccaatgtcggcgggggcatgcctggaggaggtaatccgcatggccaaatgcaggttccgcagcagaagccagataatcagttgatgatgaactatttggcccaggcattgcagtctcagggcacttttaccggatggagagccgatgtttctctcaaggagcgagctgttaatgtatatcagatgtaagtggcatgcgatatgtgtatggtgttggatcagtcgcttgtgccagtgctggtttacaaggctatggtttcacactttccattctattgcgcaggctgacaatgtatccccaggtggacatcccttcgtttaatacaaccgcatgccgctctacagagcttagcacaggctgctttaagttttgaacagaaagcttttaacaatgcaaaagagaaggtatgctctcccgttcgtttgcttatatggctggctcttaacgtgcaaacattaggtcgattacgataaagaatgcaacgataaactggtccatattcgagatactcgggctaggcaggcggctgtattacaacagaatggcggcatgatggctcaatccggccacgcggcgggaatggccggtgttggacaggctccgtttcctcaacagatgggccgtccgacacaagcttctccaatgcctggacagcagcagatggccatggggatgaatgatccgagtcgtcaggcggctatacagcatcggcaacagcagcaacagcagcagcaatcgcaggcaatgcttcaacaacgagcgcagccaagacctggtaatggtatacctctgacggatgatcttagcacgctttcggctcaagactacgaaaatgtttgccgtatcgccaaccaaatcttatcgaagacttcccaggaagatgtggacaagatcaaaatgaatctacagaacatgaccccggagcaaagacaataccttaaccggaagaatatggatcccatcacgtatttctttcgctcccaagcattgactcaactcaggagacacaaacgagcccgacaggaagcgcaacaacgtgcgcagaatgcaggggttgatcctaatagtgcgatgatgggagatcccatgatgaacgcccagcaacgccaaatgttccagaatatgatgaaccttcagcgcaattcattctcaatgggaagtcagccgaatttggatccgtcctcattcattggcaacgttgaaaatatacagggacaacaggcggatggtttgcgctcccaggaggcaggtcagcttgtggtgcctgctagttcttcccagatgaaccaacaaccatttacaacgcctcagaatatgtttcaagtcggccagggtaaccagaccaatatgaacggtgccggcattagtcctcaattcttctcccaacagcaattacagacgtcacaaaatctccagcaagatcgaacgcaacaggcacctcaattccaaccacaatcgcaagcacaaacacaagcccaggcgcgcgcgcaggctgctcagaaagcgcaaatggctatatctcaagccggccaagccaattctcaaatgcaacaacagctgacacagcaaagtcccgccatgccgatgctgaatcgtcccatggctccgggtcagatgtcaccagcgcaagtgacagctcaagttcggcctccgtcacgggctcctgggcaacaaccgactggggtccagtctttgggaggacaaacgggcatgcagggtcggcctcaaattcctcctaaccttccgccaatggttcaagaacaactggcacggatgacccaagagcagcttaccgcgtttttaatgaaccagcagcgccgtccactcaataatcaagctatggcgagagcaaacgctaaccagcagtccatgcctatgcaacagaacctgtcacaagctggccagggtcagcctatagtgaatggtcaggcgggtaataatcaaaatatgcgtgcctccctgaatttacaacaacagctcgcaggtatgggtggtgcacaagcgcccaatcagatgctcccagggcaacagcaaatgacagcccagcaacggcagcagcaacaacaacaacagcgtcaacacgacttatataagatgcagttgcttcgccagcagagtggaggcttggaaatgtcccccgaccagatcaaagacatggatcgcttgccattccccccttcaatacttagcaacaaccccaacgtcccttcgccagttccgaaacatataaagacttggggccaactgaaacaatgggcaactgcaaaccctcaagtccttgggggcatagatctacaaaagttagtgacattccagaaatttcatttggctcagatattggcacaaaacaaagaaggtggtcggaatcctgatagtggtggccaaaatccttggatgcaaatgcctttccaggggcagcaacagcaatttatgaaccaacaacagttccaagctggccaacaacaagcgccaataaacatgcctccaatgcgacagatcactgtgcaagatattcaaatagctcgtcagcgactaggaactcaagtgcaaaattataccgatgatcagcttcgagaactactctttaggaaccgacagaaacagttaatgcagcttgcccagaaccgtgctgctcaacttgcagcccagcaaggtcagcagacccagtcgtctcagcagcctccggtcaccgcgccttcggccacgcctcaaatcaagtctgaggtccaacaccagcaaccaacaacacagttgaatcagcagatgcaagtgacaaagacccagaacgcaacacctggaaaaggcgccaaaggacctgcttctaagcaaccgccgaagaggaagatgccaaatgaagaaagcgcggacgcccagaatacccctgcacaaaagtcggcgcagcctgcgacttctcaaggattgtcaggttctacgccagcacgacctaacatgccgttcactcgtgagcagctggtcaatatgacaccacagcaacgtgcacaattggaggcgcacatacggaggcaacagagccagaatcaaacgcgagctcccatttcgagaaccgctgcggaagagcaatggaacaacctaccggacaagatcaaacaatggtacaccgaaatcttggccaacgccccatccaatgatcctatttctgttcaaccagagcaaaaagctcaaatggcccagcaactacgggagtgtacggatatgctgggtaggatggatacactggtccaatggttttccaagattcccaatcaggaaaagaatgtcaaaagcttattagctatggtacgtctgaaatgcctttttcctatttgattaaggaaccattgtgctgaccctgtgccatttagcgcatacaattaatgaggcaattcaaatctggacctgactggacgatcaatgaccattttactgtctcacccgagtatctaacaatgaccaccaactatgttaagaagcttttccaagccatgatcacccgcgtcagccaacatcaaaaccaaccatctggacagcgacctagtgtctctcaagggtcaactaatgtgcaatcgaccgcccagaataacatgcccgccttaaacgcaagcaatctccagcaacttcaacagcaggaggaggctattcagcgggcccgaagggcttcgagccagactgctgtctcggcaacttccgccgtaccaccggcaccgtttggcgcgccgtctccgcagggtgtaccccatgtttatggacccggtagcatgccccctcaggaactaaaactgcctccgccgaagaagaggaagcagtctcacgccgggcctactgccggaacagctggcaccaaatcaccggcaaccaaacagactacagcagatgccaaaatggctgctacagctatggttggtcctttcaaatgcagtgttccacagtgtcaacatcattaccagggctttgcaacccagaacgcgctggacaagcatgttgaagatacccataaggttgaagaatcaatcgaagatccgcttcagtttgcccttgacagcttccgtaatctggtcgaggaggaggacaaggcttcacctgaatctcaagctccgaagaagagtactggtagtgcaatggacaccccgcaggtgcctcctaaagtgggcatgtcctcaccctccatgaagcaagaagcaggaacaactccaatcaccgctggcgccactccggtgacacgcgtgtacggccagttcggagcgaaacccacttctcccgcatccaaccagacccctcgtgggccatcaagcaaagtacctttggcgacagccaagccttccggtagtaaggatgggaagaaagaggccggcaaagcgaccgagcagatgccacctttagagcctaccgctgaagacccttggacatcaagtgctgtttctcttgaggcgatccaggacacattcatggactttggagatgacagtggctttggtttcggccccatggacgagttcatcaatgcagacatgttcgccaacactcagtcgaaagatacaccggattcggttgaaaccgccatcatcaccgagacacctaaggacaacgacttaccgaaagtcggagacctggcaggtaaaggtgcggaataccttgaagataactggattccaatggactggatcaatcttcctggtcggttcgaagatggacctctcttgaatgagtcctgggaggatattgattgggacactctcgatcggagtaacggaagcatgaatgttgacgatagtggaatcgccatctgtgccatgtaaaacggtgttttacgaaaagaagaaaaggaataaaaaaattaaaacttaatgaccatgagcaggtgaaaggcgctgcggcttatctcttcggcataaatacggatgacttatgtatattaagaccaggccagtgtggggggccacttgtttatgcttgtgattttgttttcttttatgtctgtcactcttgtctgttacacccttggaccacttcgatttccctgttcatctatagttggcttagccgtggcgtttcaaggagcgagcaaaaggtcatctgtgaattgttgaaagagcccttgttctcttgctatatttcaaatcttcttcttcattttcttacccccttagtctctttccaggcgacggagctatctattgaaagcaaatataatatccacatcttcaaagtttgggtaaagacacaagaacatcgcaatgaaagtcttagtagaagttgacatggtttgcggctgttccatggaacgcggcggtaaagctcgataccagtgggtgtgtaagatacggcagatccccgggtccacgtgccaaggctcgggggatgatcagctgctgataaggacgccccatcgctccctctcttcttgattcctcactctttgtcctcctccaacaaccttattgtcaatttccgagataggctgtcaatagaagccttcctacactgtattgttcattctatgctatagcgcctagtttctcagaggagcatcttgcctactgcttccaagactcccccggatatacacgggtccttatctctcagcccgccagctttctctctccaccacgactaagaccttttgattcggcatattctttccagggcaccgtagtgccccgtgagaaaccatggcgaccaaagcaatgattccgttcctggtcacgatgatgctcgtgaccggtgtctgcaataccatcctcaacaagtaccaggttagatcccttaccaggtcctgttgtctgctttctgctaaaacccatgaacaggatatgcaatgcgtgcgaaactgtgattcctcggatccaagtgatcgccagctctttgagcagcctgttatccaaacgtaggcgttctcatatcatcttctgactcgtgcttcgacttatggtttggttctacaataggattcagatgttcattggagaaatgggtagctggctcgtggtcctactctcattcatttaccaggcatacatctcaccgcgcttttcgaaccaatcatccccccttttagtcggtggctatcaccctgtcgcggaaaatgacggcatcgacgatacggtcgaggataatgcgattggtggggatgacctccccaatgaccctacaaagcccgcgcacgcgcacgacgggcgtatacggctacatggccggaagatctttcttcttgctgccccggcatgctgtgacatcgcaggcaccacccttatgaacgtcggtctgctctttgttgcagcaagtatttaccaaatgacacgtggtgcgctagtactcttcgttgggctattcagtgttctgtttctccaccggaagctctacctttatcaatggatggcactttttgtggtcgtcctgggagttgcactggtaggccttgcaggtgccctctttggtgacagccagaaccacgatatcacacgtgaggatgccatggcagctgtagcacacgtctcgatgcaagcccgcgctcttgcaaagacccctgaagcagttcaggctattatcggtgttctccttatcgccgcagcccagatctttactgcctcgcaattcgtgctggaagaatggatcttggaacactatgctatgaaccccctccaagttgttggctgggaaggtgttttcggcttctctgtaactgtcatcgggtcaattattttatatctgtccataggccgtacggaagctggccgctatggatactttgatgtcaaggagggatggcatcaggtattcagtaacagagctatcactatctccagtgtactgattatgatcagtattgggtacagtcacaccctttacctccctaggacttgttgatcaaacctaagagcattggctaacatttatccttttacagtggcttcaatttcttcggcctctccgttacccgttccgtttccgctacatcccgcagcacgattgacacttgccgaacactcttcatttggcttgcctcattggcgctcggatgggaatcctttaaatggcttcaggtggccgggttcgcattacttgtgtatggaaccttcctgtttaacgacattgtacgcccaccactcaaggcatgtcttccccgtggagtgagggagagagaattgctgctgccagaagagccgatcgagcatatctaaatttagagaacgggacatgctattggcatctcaacatccccacgcccatcgtcttggctcacgtcatcttgcttaccttacttttggatacatggttggtataaaccattggcgttgcaggctttcggtcgtcctcattctgtctggtttttggtttctaagaatggtctcgtattatataggtgaacttggtttactttcttgggctttgtatgcgatcgtatttagctcttatcaacgaacgcttgaaggcaaatagaagagggaaacaaaaaataatagtcacagcccggtctagcgtaaataacatactctaacatcacgaaaatctaagtccaatcgcaacgacgaaacattagcacaaaagacaatgacaagtagaaagccactatcctatccatacaaagaggaaaggcccactcaatatacaatctaaatcagagtatatatgtgtatatatatcgccgagtcccggtattatatagtacagatcaaaaaatcttgtagtctaatagagatgcatttctctaaacgagaacgtatagtgcacacatctgccaagagacatttattagttgagtaatagagatagagaagttgtgggtggtgtactcacacaagcgagaccgaagatcatcgacagccagaagaatatgttctattgcatatattagacgtgcccatttctcttcttttgttcctttttctttcgttctggttcggtaggggagtagttggtgcttactctgagggtcgtcttcccccggaagtacttggattgctggactgccacaataggcaattggagcatcatagcgacgaatccatagccgcggagtttcttggtaatgcagctcatcactaactcgtgggcgatagagctcacgaggaaggtgatgaacatggcgactgactgagagaagcgggtcttggaggggaagtagacatgccggcgaaggaagtgatgaaccggaatgttccactcgcgcgagaattcaagcctgggcgaatatgtcagttggtcaggtccgggtgggattctgtattcattatgtatacgtaccaatcgcatgagttccaccagtccgagtaaaagtgacgatcggcgaaacaggtgatctccgcaaatgcacccagcacatattcgaatataaccaggaacacgagcaaaaacgtgatcataaagggaaacataagcatattgattgtttccgcgaggatcaaggctttatccgctgcgctctgtttcaaatgcaactgggtattggcctcgctcaggactgggaggatgaactcttcacttgtgagggtcaacaggaagatacacccaaagacggcacacgttttcaggccgatctctgcccatgatcgctccttgctgcgaggatattccaactcgtaacagagggtagggcagaaagtgaaatcgacgtagttggggagtgtaaggttttgcggatatgtgacatggcctagcggcgaggtcaattcggtcgccaaatcttcgcgcagctcttgaatcgattctgatcgtgaatggctactacgccgctgcgtcggaggccgacggggtgctgggtcaggataccggtcgacagctgcatctattgacacagacccagggttatcaagtgcggacaagcggcgctcggtctcgctgagatgcccattatagaatgcataagagtgtatcttcatcaaaaaggttaaggtatgcagagtaaagaatacctgcgcagtccaggtccagcgcaacataaatggccaactaattgtttgattagctcttagtcctaagcggagttatagttcgactcacttaatccacaggatcagccaagctgcttcgaaaatgctttgtactatcatgccccctcttccccatcgcagccacccattactgttcctgtaaaggcggtggagcggcaagactgctgcactactcaccaccatggcgaggtcgctgaaccccattgcccagacatttgccgtcaggagactccatactctcacccgcagcggggagccggtatcctttacattccgaagcgcggtagtggccaccatgataaacaacccaatccaaaacagtgtgaagaagccgcggaagttatgatagtcgctcctcggatcgaagtgagatacgcgcggaatataatcaatggtatagaacagtcgattccgggctctagcttgctttctggcgtgcgatatagactgaatagatggaggggcatcttcggcgacaggggttgaacgtccactggcatgcagctgttagactcatgggaaatgggaatcggctcaacggtctcacctacctcgagtcaagagaacttttctccaaggagagattggcaggatcgtcaagtttcttcaagatagcccgtggccgcaatagcggggagccattactctgtgatactgcagaagacatcctcgcggagtcaggagtgctagatgtcatatacacttttctcacatttgttccgtgaaactagcagaagcgctctaaaacagaagggccagtctaacttaatataagatctctcaaggtttcggtgaacagatggaaaggattgtctcgaaggacacttgtacatccaggagaaggtggatccttcgtcaaaaatagttgtcgacaaggtagaatgatttgcgcagggaccaatttttaaaagggagaagatggtcggagtcgcggatcagccgggcatcggaccgcgacaagtgtttcctataccattggcatccaacatttgcaacgaattatgcagagaacaaggcacatcgagcggagatcatggggggccgtagagcctctgagtaggaaaagttacgtatttctgtacggagtaacttggaaaccctcacgtcatgccgtccacctgatcccgggcctcggaaccgcggtaccgccgaagtacgtaccttatagagcggtgcggacgggataacgatacgaatacgatacggagtacattttttatgacctgcagtttcaggccgtcgagaatcagatttccaagccatcggatcacgtggagacgtccacggcacgaggggccctagactcaaaggggggaagcgccaagacggacaagtcgcagaggacgggcgaggctcaacctaccgacgccgttactgctactattattgtttagacgcttttcatctggccctggagttgcgtggactggtttcttcgcattactctcttctcctccgtttcttcttttgtcccccttcatttcatccccctccttaataccccgtcgggggtccctgtggccgccatgacatcccgtaagtcgtgtccattgctaatggaaccccccacactggcatccccttacctggcaacttagttgctaacaattctttctccgccgcctaatatttatagtcaagcaattcatccgaaatgtacgatctgccaagacaatcgccgatgaacgggcggtgattcaaaaagagagcgcggccattcgtgcgtcgttcagggaagagagccatgattcgggcatacggtcagccattcacgcattcatcacctgaaccgacatctcatacccattgacaggagaaacaatgttgccaagttactttatcttttcaccctcggtgagcggacgcacttcggtcagatcgaatgtctgaaactgctggcgtcccaccgcttcgcagacaagcgattgggatacctgggtactatgctgttgctagatgagaatcaagaagtgttgacactggtgacaaactcgctaaagaagtaagttacaatccgaatggataatacgcttcatggatcttccccgctaatatatcacagtgatcttaaccattccaaccaatatatcgtcggacttgccctttgcgccctgggaaatatcgcctccgtcgagatgtccagagatctgttcccggaagtcgagtctcttctttctaccgcaaatccatatatcaggaggaaggcggcgctgtgtgctatgcggatatgtcgcaaagtgccagacctgcaggaacatttcttagagaaggccaagaccctcttgtcagacaggaaccatggcgttttgttatgcggcttgaccttggtaatagacatgtgcgaagcggaggaggctgaggaaggacaagaaggcgtgatcgagatgttccgacctctggctggtggtctcgtacgggctctaaagggattgacaacctccggatacgccccggaacatgacgtttctggaatcacggatcccttccttcaggtcaagatcttacgcctccttcgagtactagcaagaggagacgcggcaacaagcgaactgattaacgacattctggcccaggtggctaccaatactgattcgacaaagaacgtcggcaacgctatcctctacgaggccgtcctcaccatccttgacattgacgctgattcgggtctaagagtcctaggcgtcaacattctcggaaaattcctcaccaataaggacaacaatattcgttacgtggctcttaacacgctgaacaaggttgtcgcgatcgagcccaacgctgtgcagaggcatcgcaacaccatcctggagtgtctccgcgatcccgatatcagtatcagaaggcgagcccttgaccttagcttcatgctgataaatgaaagcaacgtccgtgttatcatcagagagcttcttgctttcttagaagtcgcggataacgagttcaagcctgcgatgactactcagatcggcattgctgccgatcgctttgcgccgaacaaacgctggcatgttgacacgatcctccgggtcctcaaattggctggtgcctatgtcaaagagcagatcttatcctcctttgtgcgtctcattgcgactaccccagaattgcaaacctactccgtgcaaaagctctacatgtcgctgaaagaagatatctcgcaggagggtctcactcttgctgcaacttgggttattggagagtacggcgacaaccttcttcggggtggtcagtacgaggaagaggagctagtcagggaggtcaaggaaagtgacctcgttgatctattcaacaatattctcaacagtacatatgcaacacaaacagtggtcgagtacattaccactgcttcgatgaagcttaccgtgcgcatgtcggagccagctcaagtcgaacgcctccgccgcttcctgaatagccgaactgccgacttgagcgtggaaatccagcaacgagctgtggagtacaccaatcttttcggctacgaccagattcgtcgaggtgttctggaacgtatgccacctcctgagattcgtgaagaacagagagtcctgggtgctccgacaaagaagcgtcagagcaaaatcctcaaggacaagactaagaaggctgccaaaccagccgaacaggatatgctccttgacctcatgggcggtgatgctccagcaaccagcccaactggcaacggatcccaaaatacagccgacctgctggcagacattctcggcggggactcagggctctcgtcccctgcccctcagccggcgcagaagccggcgcagaagccggcgcagtccaacacagctgccatcatggatctgtttagctctaatggaaacaccccgtcgccccgtccagctgagccggcgtcgtcgtctatggacctccttggaggccttggatccgccgcacctgcggcttccacccctccaccctcggcacccgctgcccctgctcatactgcattcaataagaacgacctctctctgactttgcaggtccagcggggcagcagcggcaatgcacagatccaggctcgtttccgaaactcctcgaacttcactagcttctccggtgttggactacaggctgcggtacccaagagccaacggcttcaactcagcgcaatcaacaagcccgacctcgaggccggtgaggaaggtattcaactcctaaaggtcgcctctttaaatggagtaagtttttatccagtccccacccatctctcggtatactaacagtacccaaggctctcccacccaaactccgcctccgtctgcgtatcacatactccaaggacggatcagatcccgtgacagaccaggtcgactggaccgagccgtaaaccgatcgatcttcatacaaaggatggctcccccacgccttcccctgtcaaaggacatcaattgacaaaccaacgccctactttaattatatcacatccctttccccatttcaccccgttacctagatggttatttacctttttgaatgtaactgctctccagccgcatggagaaaaaggaaacttctttagagataagcctaagggcccttatacgtatgagctccaattgagcgagaatgatggaaagctgtcatgcactcatacccaattgattttccgtcatctttatcactcatttcacttttctgtcgtccggtttcgttccattttcgtgtaaatgtttgtttgtgggtaaatcaggggaagaatttgataattgtatgtatttacattcggttataatgaggatagaatcaattgattttcaatcaatagtatattgtcggtgaatttgttgatgggctgctcgtatgtaaacgtattttatgtaatacggagtacaatgcggggtatgagatatatatcacagtgcatattcaatctgaattaaacctacaaaccaacatatacgactataagaaatatcaagccaaatacagtctatgacttatcaatttgtgaacaagtgtccatgtgaaaaaaaacaattgatatgctatgtgccaattcccagactatgtaaatcctcccaagctgattcatcagtcatgatcgtcaatcgtcatttactccgacattccccttgataaataaaatggatgatcaatactcatcacagtgtcccatccgtacgccgatatgattcaataaaaaatgattgtagtaatagcaaaacaagaaatgtggatcgtggtcataaaagaacatatatgcctgcggtttagtggatcagagcctggcccgtttctgagcgtgaaggcatagtaatgatatcttaaaatgtgcgaagaacagaaatatgtcggcatctattgagtgctgacagacaccttgtaggttattctggtacattgttggatatcattgagcatttctgatatcaactgcaattgagccgcctaaatgctagtaaaaaggctctgggccactgaaagaaagacgaagaattgagaatgaatgtaccaagtgctgtgttccaatgaatactttggaacgagttactgtcgttatcatgggttcgttaagtgtaggtggactggcgtcttccgacaggtggggggtggtagctgtcgtagtggtgacgagaatatttgtccggcccgatttcgcgggcatatttaaactccttctccttgagacgagagctgtagtccacttcgccgaacaactgtctgctggacgattgcctagaggtctctggccgtacctgttcgtaacgcttggacggctctggggtataagcgtaagtactactccgaaccggtttcggtggggcgcgaggcagacgttcttgaggcgacaagtatgttctggagtgtctcggagatgggtgaggctgtgacggcatgcctggttctactagaatagtctccggctcgttgacaagcttgtcgttaaaaaccttatagcgtgccgacatcttaggagggttttctccggctgccatctccggagtacccggacttgagtatcctgaatccgacttatccacgcctcttactttcgcagtacgcgatggtgggtcagaatacaccatgcctaaaagtaccggatccgaacgactactgccttcccgttttgatcgggaataagaagcagtcgcggatcgcgagggctggagggaaggccggacagatgaagggactttcatccctgaagcagtggcggaggttggcatgggtgggaccttggcttcataactgcgggatggacgatcgtaagactctagatcctcgtatgagccgtggcgggaggtatcaggtcgcacgctttccgtggaccgttttgacctaccggcgcgccgggaggaggaagactctgggtcagccgattcgtagccccgacgttgattgggggagcgggaagaacgttgtctaggttcacgctccacagggagcgtccctttggagcggcgaatgtagttttcggccgtggaatattgtttctcgtgtttatcccattcgtcagagtaatcctcctcataccgtcgctcggagcggcgcgaagattccgcttgtttggtcttccgagatgacggttcccgactccgggtcgacggacgcttcacgcgtacccaaacggacgacgcgctcgaatcggaggcatcgtcttcggacccggcgtaggaagcatacatcttctcgtaagcttcccgtcgccgttccttggtacggtacttggcccggtccgtgtgggtcgttttggagctgctgcgcgccgtatctttcgatgggtggggagagctgacaggaacactcttagttttcttcttttcctccgatgctctcgtccgttgtcgcatcccaaactcatcgttcttgcggggcgtcgatcgtgattcctttgtaaaccgaacgtcgtcgtatacatcggctggtgttctctcttcgtagatacgtccatcccgatattcgcggaccgtgctactccgttgagcgtaggacgtcgaaccgcccgcggttgcgttacgcgccgccatttccctccggagctcattgatgcgaaccttctggtcatatttctgtctctccgtgggatccgataggatctcgaaggccttctggacattctggaacatctccgaagagttattcccgaccttatctggatgatgcttgaaggctagttcccgacgggcggttttgagatctgctagggtcgcatctttctggacgcctaaaacagcatatggatcgaactctggtgtggacgacatggtttggacaactcaatgaatacataaattgatcatccaaacttgtttcgttggaaaggtatataggtaaatgatggttgaattggagagggggtgtaggtgcggggtgaaatcgaaatcggggttaatgcgtatgcgagttaatatatgtttagtgttgctggtcggtggcgttgcacaccagtctgggcataaaataaggagatgcctgggagaacagaagtgtgtgggctgaatgaatgaatgcaagtgacgtggattgcttgtgataatcagttcatcgtcaaaagcgatttgactatgaccaattcatcgagaatgccggcgaagccaagagaagttgattagcagatcataggtaagacagcaaccatgcaatgtgacagtttgatgataggagagacagtaaggggggtggaggagattcaggaagaaaacggagaaagggagcggaacaagtaagtactaagtaatgaagtactggccgtcagcccaggaaccaagaggcaaaaatgggaccggcaattcccaggcacagcggattggattgttgtttggttgcaaggtaaactttcaccaaagatcggtaacgtacggtaccaaggcacggttccaccgtatcagagactttggttttcccttgcgggagaggcaagccgaggggcaaatggggaaaaatccaagataattagataaaataaaatagataaaataaatagaataaaaaaataaagaaaaatcccaaggctcaggcccaaggacactgcgccacgatactctaaaagtagaacagcgtaagttggaagatagaagcaacaagaagggaatagttcaaatgcaatgagatgaactggcaccacgttgagtcagggctgagtgataatgagcgataatgatggagaaaattccataggaagtcacggggtgatgctcgatgatgccacccaacgtcaattccaactgttgtactgtactcgacccagaatatctctctctctgtaaggttgtttcgggcaacaatggggagaaaaggcagtgataaatcggcttgtttctcactcggtatttccttttccttttcttatttcttttcttttcgttgttcttcttctttcaaaatagtctcctccctgcgttaggtatgatgttcacagttgggttccgcagtagcggtgaatggaatgaattggtaggcggagcaacagaaggtaatattatggagactccctttcccacgacacgtttaaggcccgcttttgtttgagacgtgagggaattggggtcaacgagagtagaaggattgcactcgtgatggtggtcaatcgcgataataaaaaggaccaagaataaatatcggattcaacaacaatgggaatagtcaatgcccggcagttataaagagcggtcaatagacaattgttctatagaatcaatcaatgattctgaatctatctcaaggaagcgatgaataatacggtttcacaagtgaataattcaaggaattggctcgatctgaagatcaaacacctcatggagaggagtggttagagtcgtagagctgagatgcggatctaatggcgatacaaatacccagtgggaaagctctcgaaacgtccacctccggataaagtaatctcataggagggtcgagaggcttcaagtgtaatactgtttgactagatttcacctatcacccttttcggaagtactacacctaggtcatcgcgtttgatccagcttacatccttgcattctcactcgctccgagagaaggcagggcttactctttgtctggttcaggagtgggagagtcacgacaccttctattgcttagtactaaagccacgctgggtttagtgtcttccgcgaagaacatgtgtctgcaggacagaaaggaattcctgaccttctcttctgatcattgaatttgccgaaaccgttcgactgatggcagatgagcacggtcgtcctgtcacccgtctggtctacccacccctatttgatttgacctatgcttctcgattttccacggatcaatgctggatttccatcccatacgcaccaatcaaataattcggcgacctcagcgtcgattctcgaatggatcaatcctggatcattctgactctgaccaccaactcggggccgaccagtgaaaagaagaaggtggttcattgacaacgacaacgtaaaaaccccgcactaaaggcgactccagtcagtgacgctgactcgttgtgacttacaccttagttgcattatggtccagggatggacacaccacttcgctttcaaatctcttttcctataggttacggtgtccccatttctgttgccttcaccgggaggggaatgctgtccaatcattggacatcgtctccatgcaagtccatctggtccgcctcaccagggatcatggatcatgctgcggcttctgcagttgcgaattggctcagggtcatttctctactttccccttttcatctttccctacagcttgcatgtcaaccaatgtggagaatgttcacttcatggcgccgaaggttttctcggctctatgcagcgttgcccacccccttctctccccagacaacgctgtacgtacatacttcgtgcctggaggggtatccacggttgtagccacacgatccgaacccaggctcgtgtgaaaccgtcccatggttcaataccggcaggttccgcagcgaggaaatggtacatcacgtaactgatatgactgataacactaggtacaactgtatcgaccttttactgctagagagaaagaatacaatgctagattacatgcaagcaagcgttccttactcggcggttatgttgtcacaagattttacctctatcacaaatctctagcggcaaaggcatcgcacagtgtcaaatgtcgatctatcactttgtttttttaccaacggtgagacctaccgaaaccaaccaaccaaataaaaaaggctgtcgtaatgtagctatttattattcatcactcgatctctgggatgcttccgccaatctgactatacgatagctgtcagactacctttacttcccggtcatggctgtggcacaggccgccgaagccttgcgaaagagatccttctcgaaatgcgtaattgggtccctggctgcagtcatctgcacatggagcctgttacacagagcgtccaaccagctcagccgctcttcatgcaatgattgtcccgacattaggctcgtttctgcttcatctccccgagccagcgcatccaatgatggctccaggttttctggaccttcagacggtgtagatcccccaagctttccgatggaaatacctaacaaagtaagaatgatgctgaaaccttatccgaagtaaacatgcgagattgtagctttcatttcgaggaatcattggccatccattcttcaggcttggaagagtgcaggggatgaagcaacggattgctgttccgatgcacaattaatctgtctgccactcaccgaccgaccaccacctatgcctgatgactgagtctgatttgaagccgtcgtgttggacagcgctgctgacccgggtgatcggcgtacctgactggcttacgttatcggatacataacctgatatggggggggggatgctcgttctcttcgtgcctcgtgggagtgtgatggtgagtttcgtacgatcatcgtcactctgatcggtattaatactgtcaccgtaccaatgatgttggtcgggactagtaccaaggacattttgaatcttatcaagatacccagtcggcggctagagatcgactccactggccccatttcactaatggtcttgtgaacaacggaaatattcagggttaacgcgccaaagcgccaagtggcgccccatgtaactgtattgggtactcccatcttatggtattagttcagttaccgtacctacgctgtgactaagcgtttgggacaacacccctctttagtcaccttcatccaactcagcatgttccattgagtgggaacaggaccctctacgatggttcatgtgaattattccttcctgctcgaagagtcaagtttcatctacaaagaacaaagaacaggtctccagggcaatgcatccctgctggttaaccacccctcattaagtcggatgcgatacagcacagagtacggagtaggattaaggtagtcaaggatcccacgtttatgctaaccatccagaaagatgctgtccagcttctagccatggttcgattctggattacacaccttgtggctgatttagtcaacgaccgtcacttcctgataggagaaatacctggagtgcagatgactcggttatctccttccctctggaagttgcctttctttgttcatcttgtgctacattgtcgaggtgttggatgtgaggttatttcgcgcataaatcggaagctagaatgtggcgaatgatttcagtggctatgctttgtcttcttgatttttattgttctagatttcttgatttatgtattttcttttttgttgtttgggacctaaagaatccgtttcgatttaggcatatacctcagtgacgatatggcacagggaggggtgaaactccagccaacttaatgcaccggttgcatacccgtgcctatccccatgtaacagtaccctccatgatgtaatacacacaaaaacaaacaacctcccattaaactatcaggcaggaaggcaatggcgcaagaaagagtagctccccctttgttccaaggcagccgtgcatgttaccccgatttaaagagcgaaccatacgtcaaggataggtcaaagttcaagctatctgctaccagacagacagcactgggaaaccaatcgctgcgttgtctcgaacgagtttgaggaatcgacacagaaggacaagtttcggaacccttgccgatggcgcgcgatcagtgagtagatacattaattggcactgggcgatgtatctcgcagtggttggccagtccacggcagttcactctcgccatacagggagctccaagtccacaacgatgggatgattgaaccgtttccctccgcgatgaggccagcttgtcgccatgatcgccgcgttaacgatgcaggtttctcgtcgacgcgaacgatcgttcagtgggtcacttgggcattcgtctggtcttaatcgaggatatgacgttgtagattcctcgacatcatcagcagacgagaggatcagggtattctgcgctggagggaaaagcgcgccttgattgttcttctcgtcgtcgaaaaagcaatcgtcattctctaatcgctgcgctttcttgcccgtcaggtcgatcagactttgcttcttacttcccggttcaggcaacgccccgcgaataacctgctctgaccctgtcaacggcgacagtggccatcgtactcgctcatagcctcgcgactcgtggacatggccacagatcgccagagaaggacgaactcgagccagcgcctgacgcagggcctcacacccaacggaaccaccggtcgctcggcggtcgcaatgggaatgaggcggcgtgtgcgtaacaaccaaatcggtgtccaatgggatgcggctccagagcgcagcggcgtcgacggattcgtatccccatgcccaggtcccgggtgattgggagaagggcgatccgaatactttaaagatggtgtttgggccgttgggccgggtcaagcggactagtgctgactggtgcctgaggaacacaatcgaagacgatgcagttaccacttcgatgcatttctggggatcttctagacgctgattatggaatttggggccgtgtttggcgtagaagtttgggtctagtgtgatgtcgtgattgcctgtggatttaacctgatttagtaatttattcgtagcaaggctgagttcctgagaggggaaaaaacagtgttggtaaatatagcctgcgcagggctgaggctgagtctggggcagtaggactaaccacagattactattttgacctcgaaatcagccgcggccacccagttgatggttttgcgcagctcggttatgctcccttggtttgttaggtcgcctgcgtggatgaggacgtcgcctgctgggagtttgaagccggcttcggctggggtgtagccgtgggtatcggagacacagacgaagcgcgtcttgcggcgcatatttccattgtggaatcttggctcccgatgtagctgaatgagaggcagtgaggatacactttccaattcacgaaggattaactatgagagactgattttgatagtgatgattaacacgggacccacaaagcaatgcttgaatgaaattgccataacatcatactaagacgatatctactatgggtccgaagataagatattttgtaccacccatttgagctagctcaataaaaaagaactccctccacgcaaatttgacaggtccatgttggtcgtaaaaaatctggccactggggacaaaaccgaacagacccagtctagaacccgcgggccaatcaatcctggtggacgggtgacaaagagaaagccggccattccgatagtggagacaaggtgaccttaagtcatgaccaccttcaattcccactacttacgtagtacgtacggagtacattcttctctcctgtcagactggcgatctcccgatcctgaaacaagcaacaattttccatcccaaaggccagccaccttatcctcacccgactgaggataccaccgccacatcacaatctgtttggcacaatgcctcgctggaatcgcaaaaagaaatcccaggcgaaaaatgagataccgagcagcagtaatcccgcggtggtgccatccgacaacttgacagccgtcgcttccctccgcgcggtctccagtaatccatccgatgcgccaaaaattgctgaattagatcccatcgagcttcgaaagctagcgaagcagcatgccgagttcggcccactcggggatccgtctcatctttacaaaagtgagcacccgggcggcgagataccggacccggtgcttgatgagcccccctacttcattgccttgacgacgtatatcagcttcctggttctcattttcttgggtcacttccatgactactttgcgaagtggttccgctcgcatacgtatcgtcacttaaggcctcagaatggatacgcgtcgctgtacagtgatttcgagagcttctacacgaggcgtcttaaacagagaattaacgattgcttcgaacggcctacgacgggtgttcccggcaggtatatcaccctgcttgatcagacgtcagaggacaatcttcatttccagcttactggaacgacgaccgataccctgaatttgagttcgtacaactatctcgggtttgctcagtccgagggaccctgttctgacttcgcggaggagactattcgtcgggatggtatcagcatggcgggatcttgtagcgaggcggggacttcaaagctccacctcgaggtagaaaaccagattgccaggtttgtcggaaaggagtctgcaatcgtctactcgatgggctttgtgaccaacgccactatcttcccagctcttgtcgaacggggttgtctgattctgtccgacgagcttaaccatgcgtctattcgtttcggtgcccgtctctcgggtgctgctattcaagtttttgcacacaataacatggccgatctcgagaagcgcctgagggaagcaatctcccaaggtcagccacgcacacaccgaccatggaagaagatccttgtcactgtcgagggtcttttctctatggaaggcaccatgtgcaaccttcctaggattctcgagctcaagaaacgatacaaattccacctctttgttgacgaggcccattcaattggtgccgtcggaccccatggacgtggtgtctgtgactacttcaaggttgaccctgccgaagtcgacatcctcatgggcactttcaccaaatcctttggcgccaatgggggttacattgccgctgacaaggcgatcatcgacaaagttcgctttacgaacgccggtcaggtttttggcgaagcacccgcgccttcagttttggcacaaatctattcttccctccgcctcattgccgatgaggacccccttcaccctggccaaggtattgagcgagtgcagcgactggccttcaactcccggtatctgagactcggactcaagagacttggattcattgtctacggacacgacgactcaccgattgttcccctcatgctttacaaccccgccaagatgccagccttttctcacgaaatgctacggcgtaagatctccgtcgtcgtcgtaacctacccggcaaccccgttagaactttctcgcgcacgattctgtgtgtccgctgcgcacaccaaggacgatctcgaccgcatcctgcgggtctgcgatgagataggagatgctctggaactgaagtactcgaccggtgttgcgggcggtttgagggaccctccgtccgacaaagacctcaagggaggtaagaagacgattgagcctcctcgctggaatatcgaagaagtcatcgagagaggcactcgagacgccaaattgcccctgtattgaagaacatgacacagccagggacgctgtttactacttcttcacatctcacctcgatgctgtaacgaaagccagacattttctcttctaccaggaaatctccgttgatatatgtataatacgctgcgattaacgagcacaagacatatagtattataataataatggtaatcaacatcattctaatgtcattaatttcaggtaccacttagtcagcggacccagtgatcttcatccaaataagatctcggtaattggaaatacgatctcaatctcaaagcaaaatgttcaacactgctggtacaactctacagcacggcctctatactacccagctataggtctaaccaagaaatcaactgccatctattttaggatacattgtgcgactacgtagaccgcagaggtcgtaatgaatcctctacatggtaacctgtatagcctgcaagtggtttaatacagtctatggtccatagtggtgattgcattcctcaaagtgtacctctagacggactgaaacggtttggtgactgtagttccgcccagttgcacttgcggggcgggcagcgataagtgtgcggaatcattgatacaaagtaatctaccaattaatgtttgacatcactggccttggaaaccacaaggtaactccctgataagggcaaacgatagtggagcgggcctatcaagttggtacagaggcggacggggctggaatctccgggagcctcacgtgatagcgctcaacgggattggccggagttagggctggggccctcctcgaccttaccaaagccgcacattagcctcgcttagccagcgtgcgaactcatccgacttcgttgtgtgcgtagaacctgcccacaacgacaacaaccgccgacaacatacatcccaagggagtatcctagagcagcgctcttcctttcgctggatattttcgtgacagaagagcaggatgtcctccaccgagccagtcgtgcgtacacccccttcacatgcagtcgctttccgggtggaaaccttccgtgatatatcttttgaagacagtgaaatgccgtggatgcggagaggaagatagagagatatcggagaagggaaagacactctgtttgggtttacaatgatcgctgacttgtgatggattttggcaggtcgtcattgacggcaagggacaccttcttggtcgtctggccagcactgtcgctaagcagttgctcaatggtcagaagatcgtcgtcgtgaggtgtgaagccctcaacatctccggcgagttcttccgcgcgaagcgtacgttatccgacccgatctgttttttctacttgtgtttgctcggaagttttggggcggttaaggaagcattggaaagaggagatctacgcaagaattacgcaaatggcggtggaacaacagatgaacattgttactggtacagacggactaacatggatattgggatatagtcaagtaccacgcctaccttcgcaagatgacccgtttcaaccctacccgcggaggtgagttcaaccgacagaatatcgacgcatctccgtggacttgtgctgaatgatcgcaggtcccttccacttccgtgctccctctcgcatcttctacaaggccgtccgtggaatgattccccacaagaccgcccgtggtgctgctgccatggagcgcctgaaggtcttcgagggtgttcctcctccctacgacaagaagaagcgtgtcgttgttccccaggctctccgtgtcctccgtctccgccccggccgcaagtactgcaccgttggccgtctcagccacgaggttggctggaagtaccaggacgttgtcgccaggtacgtattaaatatcctgaaatggatagcggagaagatttcgctacagaggtggctgtatcatggctaacggagtttttctttcaactacagactcgaggagcgcagaaaggtcaagagcagtgcatactacgagcgcaagaaggccgctcgccgccaactcgtccaggcccagaagtcggccggtgtcagcgaccagaccaagagccagcttgctcagtacggatactagatacctcgttgcgcggctggttgcttgtgtctttgatgggatgggttgagatcgcgaacggtttactttcggcgagattgtttggacggcgaaccgatcgaccttgttctcactgtccctaccttatcatgaatatcccacaatgatcatgttgtgacgcacatggaggctggagagaccgatttcttattataaaaaataacggagtcgcttgggatggaaggttgttcaaaatagccgacctctatttcgcgccgtggcggtttaatccaaagaattttctttccgagttaagaatgactctacgaccagttacttgtcaaaattctccattcagtaaacatcgatacctacctaatacagagaccgaataatcaccattctcgacaatcatcactctccatgcccatgcgatcctagtcccggctacccaacactacaggtcatccccgtcctccccctccccatctgtaggtccagttgccgcccacaaatgtgataagcgggtgatacgtagatcaaatgtgacgagattatccctgcgtcaaacttctttgtgatcacacacccatgcgcttaaagtcccttcaccattggtgtctcttcacgtgtggccactatttagtcaactgatcatatttctctaacagataatatatataatgtatcgtacactgatatattaacccgctgctaagcgccgtatgtgtgatatgtctgcagcgggtttaatctctcgatttatggttatgcatgaacacagacaggtctgctttactttccatccccgtgaatactcgtggttctaataataagcatgtaaatatcttattgcagtagtactagcatcaagatgcaaaatccaccagttcaacatgtgatccgaacgcttgaatgataaccttcgtaagtaatgggacctaaccaatgaccaatcatcttggcacaccttactaatcgctactaagaaatggtgtaccactgaatgagggaaaacaaatcaagggcggaaagaaaggattacgcaaggagcgagataataaccaaaaacgtagttgaagtcttcactaatttaccacatcgagacaatttcaacccttcctaaatccaagaataacaaaaggtaacctccggagagaaggaagggtaaacaacagcgggaatcgaatcgatcctcccgcctcctccgcggtccgactcggagctaatcacgatttccccgcatttcgcagctttctccaacttggggtcagggactggttgtgacgacttactcttgttttctccggctttatctataattacacgtttctgattgaatatttcctgcatatcctgtgacgaatcggtctaaattagccccttttgttcttacaagagtcgttatatctgttgccgaggatcgaatcatgtcaggtgcggtatcgaggttgtcgggactcttgggtcattttgtccctggtgcagagcagcgggttaatttccatacgctgtcgccgacatctttcttgcccagggcggcggctattgaacccgaggtttgtcttggttttctttcgattcctgttggggttccaaggggtgtgtggttgagtgctaatgttagaggataggctgtggccattcatcacgttactgcgaataaccaagttttgagacggacttatgccgagacggcggatcgtgcaaggggtcttgcctattatctgaagaagcatgggttcaagagagtcggtgttctgtgccctaatacgcctgcgtttttggagtcaatctttggaattgcagctgccggagcggtgaatgttggtacgttgtatattttttacctatttgataggacgtacggttgttggggtgttggctaatgggtagttgaatagctgtaaattatcggctgaaggaggacgatatcgcttacatatttacgcactctgatgttgaggctattattgttgaccaggagttcctgtcgcttctgcagagttatcgtgcttcaaggcccagtatccctattattgttgatatggatacggatgctaccgaaggcgaattgtccggtccctttgatgaggtggttttggaaggcttgacgtatgacttggatacaggggccaaaggttggcctgggctcgaggcccaggctgcttctgaagatgacgttatcgcccttgcatacaccagcggtacgacggctcggccgaagggtgtcgagtatacccatcgtggctgctatcttgctgcgatgggcaatgtgattgaatctgggcttaattcgcaccgtggtcggtgtcggtatctgtggactttgccaatgttccatgcttgcggttggtgttcattgcttggattatcttgtgatgaatatttacagctgactctttttcagggtggacgttcccttgggctgtcacggcagtgcgtggtacccattactgcttgcggaagattgactacccgcaaatctggaagctattgaagcaggagcacatcacgcattttaatgctgctccgacggtgaataccctactctgcaattctaaggaggcagagccgttgcccgagcctgttcatgttacagtcgcggcgagtccgccgacgcctcatctcttcgagcagatgactaacttgaacctgcatcctgtgcatgtatacggcatgacagagacatatgggccgatcacgaaaggctattacctgccggcatgggacaacctgccctcaagtgaaaggtataagaagatggccaggcaaggacatggctttgtgaccagtctacccgtacgagttattaagacggatgttgccgagggcactgttattgatgttgctcgggatggtaaggagataggtgagattgttttcgtcgggaatatctgtgctcggggctactacaaagaccccgacgctacgcggaaactcttcgcgggtggcgttctccactccggagacttggctgtgtggcatgccgatggctcaatccagatccaagaccgggcgaaagacatcattatcagcggtaagtcctgaacttgaatagcacaccgtggtattttctcttgctaataagcgagatgcaggcggagagaatatctcatccgtagcgctggagtctatgctggtcacccacccggacatcctcgaggccggagtcgtagccgttcccgacagccattggggagagcgaccaaaggcatttgtgacggtgaagccagggaaattcttgaccggttcagaggtgatcgaatgggcgcgaaatgccagtgatatcagcaagttcatgattcctcgggaggtcgaagtcgtggcggaactgcccaagactagtaccggaaaagtgagaaagaacatcctccgcgactgggctaaaggagcgaaccgatcgtgaacgaagtgttctagaatgaaaataactgtgcatagacaatctagacaatatacatgaatttttgagattgggttgcgcccagcataggctgacatttatccctgttgtttcccaatcaatatactttacggtcttgccgatagttcaaccgccatgccaataagtcccattcttgtaagggggccactggacccgaccttgcctgaccaaatactcatttgggttgaaaaagggggcggtactcaatagactgccaagtggagagatcagtggccaaccgagagggttgagatgagatgatgatatatattcagtactagtagccagtatactatatttggaggacagttgttaaacaggtggagagatccgtgtgtctggtgacacgccatggaggggaaagcaatgcgagatgacaggtaatattgagaagtagtactaagatatgtatgtctgccttgatcaagggtccttaaacaacaactttgaactactcactgctcactatctaaggtaattgccaaagactaggttcaaggttagtaaagatccaagtccaggcggcgttagcggtaaccaatcggggcacgagacgaacattgcccgaccgattgggagtcttttccaattttgccctcaatcaagcgaagatcctacccccccatcaccgacttggaatccctctcattgctgacatctgactcgtccgtattttattcacattcttccttttccagtgttgtctgtcaggcctggcattttgacaaataatcaaacagtccacaccccacggaaacgccagcagaaccggattcgcttacttcccctcccttccgctgaactgcagacgccgccttccctttcttcacagccgcccgattgtctggctatataatctccgccccacgagtcccctagccaaaccgctttcgatcatagcttggagtgcgtctcctagccgtgctcactcaaccatccgtcaccaggaacatttgtacctccctcgcatctctccgccgccgcctttcctctattcacccctcccttgccttcactagtctgcaacggccacaggcaacttccgacgcgcgttgccccttcttaagcgccttcgctcgcccgttcgactgtaccgttctcgacacagctttcggagatagaccaaatcaaaagaaaagtcgtctctttttctgttcacttttccgatcaacggccataggagcgatcttgaacaagagttgcgccaactcttgctaggtcctttcgcctccatggtcttatagagacgaagtccatgccgcacgttcccatcagtttgtgagatatcccacaaaccgatcgtttcaacctatctgaaacacgctggaatcgcatccctcggtggtcctcatgccccgctcacggcaacccgctcggttctcgagcgaagctccttccgagtcgtcatcctcgacatccccggaccggaacgttgatgatgacaccgacttcttcacagcccaggcaaatgattcgcaatcatctgttggtggcattgcgacctcccgtgacgtacacgcacaaaatgagcattatgtgcttccgccgatcggacgtcttcccccggaactcctgatcgccatatttgccaagctcagctcgccggccgatatgttgagctgcatgctggtgtgtcgaggatgggctgctaattgtgtcggaatactgtggcaccgaccgtcttgtagcaactgggtcaatatgaagagcattacgatgacagttgggaaagaagatagtttcttctcgtactccgatttgatcaagaggctgaatctttctgcgctgatggaggaggtcagcgacggcactgttgtccccttcgcacaatgtaaccggatcgagcggttgacattgaccaactgctcgaaacttacagacaagggagtatcggatctagtggaaggcaatcgacatttgcaagccctagatgtctcggatctgcgttctcttacggatcacactttatacacagtggccaggaactgtcctcggcttcaggggcttaacatcaccaactgtgtcaaagtgtcagatgattcgttaattgtcgtatcggagaactgtcgacacatcaaaagagtgagtgctgtttggaataattgtattactgaagctaacatggattagttgaaacttaacggtgtcatacaagttacggacagagcgatcacatcgtttgctcggaactgcccggctatccttgagatcgacctgcacgactgcaagtctgtcactaatcgttccgtaacttccctcatggctaccctttccaacctccgcgaactacggctcgcgcattgcacagagataaacgatctagcattcctggaactcccaaagcaactctccatggacagtctccgtattcttgatctgacagcctgtgagaacatcagagacgacgctgtagagcgcataattagttcggctcctcgcctacgaaatcttgtgcttgcgaaatgtagatttattaccgaccgtgcggtatgggctatatgcaagttaggaaagaacttacattacattcacctgggccactgttcgaacatcaccgatgcggctgtgatccagcttgtgaagtcctgcaaccggatcagatacattgatttggcctgttgcgttcgtctgacggaccgcagtgtccaggagttggcaacgttgccgaaactgcggcggatcggtctggtcaagtgcaccttgatcaccgatcgcagtatctcggcactagcacggccgaaggcctcgccccattcatccattagtagcctggagagagttcatttaagctattgtgttaatttgaccatgcctgtaagtcttccgatcggtcaatgctcctcgccaaggattcaagtgtctcacatgtgatacagggaatccacgctctactcaacaattgtcctcgactcacccacctcagtctgaccggggtgcaggaatttctacgggacgagctcaccaaattctgtcgcgaggcgcctccggaattcacgcatcaacagcggcaagttttttgcgtattcagcggtgacggcgtcaagcaactccgcgaccacctgaaccgaaccgtccctccggcccgggaaatgaacgaggctaccatgtatgacgatgacgaagaactagacgaggatgaaggtcaagtgactggcctgatgcatgcgacagcaattaacgacgatgatgacgactatattgacattggacatcctcaaggttgatacccctgccttatacctttgagcgtatctcgttcttctttctttgatttggcctcagcgtttttatccatcccgcgttgttttcagacgaatctggtcacggtgcgagcgttgcgtttacgaagtggctatcgcagttgatcatatgggacatgcattggtagcggtacagggcctaccttctaggttgtttttatctgtccgggactaggcatatatgcggtcgcattggaatgaagctgccacgtagctacgctcccatacccggcctggtggaggaaacgggacatcagcaacaggatatatacatcttcctacggttgctgctggggatgtatagattttatctaagtacggcgtattgcgtccaggactcggcactatttgtagctacatattgcatcaatggcgttggagcattccaaaatcaatttgtatttctagttagacattagaagactagtttaagccatgtatttgatttccttgcaggattggcgagtacgatacctctagcgtgagacttatatgtgattcctttaagatctgagtgccagtcgttcctcctggatcgcccactgttgcaagatatcaggattgaattgaaggtacgtagtattccgtactactagtatgtgatggtctgcgacctcggatctatacttagacggataaggctaaccctattgggaatgctacttgggtcggctgacatcattggaagtgtttggtgtccgcgcattaaatgtcattccgttagagttcccccccacttccccttccgccttgatgcgcgatctccaattctctctccacatcgcaagtgtctggaagctcgcgtcttagtcgtcactcgctcctgggctggaccccttcaaaagaggtcgacctctaatggcttcactccgattgccgcgggccaacccgctggcattcactcgctggcctgttactgttatcaccgcgatcgtttatcttgcgctgctgattccgttgctggtcgtgcatcatgttgtaccttcagcccccagctccccacctagcggcctgaacatctcggaagcttgggctgatcttcaagttctaacgaacggcttccacccatacaattcgcgccgaaatgatgtcatccactcttggctactgaggcggatcaacgagatcctggattccacgcccttggagcaggagtaccgagctcttgacgaggaaaagccggatgtctttgtttttgatgacgtgtactcgaacctgaccacttatgggggtaccctgaaggatgcagatctcggcgtctatttcgaagggaccaatgtcattgtttacatccgtgggtgggaagatgacacagagcattggtgggaagcacccaacggagtaccgacgagtaggggaggcgtgcttgtgaactcgcactatgatagtgtctcgaccggttttggggctaccgatgatggcgtcggcgttgttacttgtcttcagctcgtcaagtacttcactacaccaggacatgctccgcgacgaggtctcgtagtgctgttcaacaatggtgaagaagatttcctgaatggcgcgcgcgtgtatagtcaacatccgatctcgaagttgcctcatactttcctcaatctggagggcgcgggagctggtggacgggcgactctgttccggagctctgacttcgaggtcacgggcccgtatatgcggtcgccgcatccttttggatcggtgctcagtgccaatggattcgataccgggttgattgctagtcaaacggattatgtgatctttcaagggaacatgggtttgcgtggtctagatgttgcattcatggagcccagagcgaggtatcacacgaatcaggatgatactcggcatacgagcaaggactcggtctggcatatgctgtcagcggctgttgctacaactgagggacttgtatccgactcgaccgatcgttttgacggtgcgccgaacaccgatggcggcgttcccagcggatctggctcccaggccgtgtggtttgacctgttcggaagcacctttgtgctcttccagctccacacgctgttcgcactgctggtgacgttgcttatcgtcggcccccttacgttgctctttacgagtatcgcccttacgaaagcggacaagatgtatctgttcaggtcatccgctaagtccgaagaccgtctcgacgtggttcccctgcagggccttcggggcttcttccgctttccgtttctctttggaatcccgaccgtcgtcactgtgggcctggcgtatttggtcaccaaggttaatccgtacatcatccatagcagtgcttatgcggtttggagtatgatggtggctgcgtgggtctttttggcttggttcgtttcccgtgtggctgactttgcccgcccgtcggcctttcatcgtatctacacactcacctggatgtacgttctctcttgggtttctgcggtgattgctactgtgtatgcaaaccaaagaggtctggccggagggtatttcatcttctttttccatgccggtattttcttagccaagtggatctcctacttggagctctttgccctgccgtccaaaaccgagtatgcgaaccagctcaggtcagcttcagggcgggccagtggtcacggtagccgccggggtacgacttctggtgaggacgacggagaggaggcggaagaagagccgacggagtcaacgtccctgctgggcagcggacagcggactacgttcgcaaactacgtacgagtgggtggagataatcatgcggtggcagaagaggaggtgatcgatcccaatgtttatggtcgcgagcaggcatggagttacgcgttgcccaaatggacgtgggtcttgcagcttcttctcactgctccgattacccttatcatggtcggaccccttgcgctcctgacgatcagtgccatcagccagacaggacaggacgggggccatccgcttttcgcctacgttgcgatagccatattcacgacgattatgctcacgccgcttctacctttcatccaccggtatacctaccacgtccccttgttcctgttggcggtcttcctgggtaccctgatctacaaccttgtggctttccccttctcagattccaaccgcttgaaactttactacgtacaagaggtagacctcgatactggcgtcaacagcgctacctttgctggactttctccgtttgtaaaagatgtctcccaggagctgcccagcgccgccggccaaaccgtttcctgcgagtggcacactaagaggaggaacctgctgtcctgctcctgggaagggattgctccgcagccagtggagggcgaccacccgatgaaagactgggtgtctttcaatatctccaagtccaccgataagccgcaagctcggttcgaggtgtctggactgaacacgcgtgcatgcaggatcctcttcgacacaccagtgaagaacttccacgttgccgggtctgcatatgacccgcgcttcccgtatgacgcggccggcgtcaacgagattcgactctggagtcgcacctgggagaaccaatggacagtggatgtggactgggacgagggagctctgaaaggcaatgtcgtctgtctgtggagcgatcataaccagccgggggttctaccggcattggacgaggctatccagtttttgccggtgtgggcggccgtgactaaagggagtgatgggcttgtggagggtcgtcgtgcatttgagatcggcaatgatgattgattaatgttctgaggcatcactggcatactgttgtatgtcgcttagcgataatttgttttgttacactataggtagtacgtatagtataagcatatgcgggggtctttatttctaggtaacgaaaaatgatcaatccaagcaagaaccaacaccgtactaagatgataacccctatcaattactcaaccctactagtactgcacaagcaactcctgaaccaaatataccaaaaaccccctatactccactccaccaaaatagaaataaagaaacaccaccaaaaaaaagtccaaaatcagtaaagaaaccacaaagaaataaacaaaaagggaaacaaagaacccaagacaaaagttaccccttacagcaacccagcacgtgctccagcgatcaacgaaaccaaagggccgatccgagtgagatctatttatataattcgaccccatcgcatcgcgatcaggggtataagtatcgtattacttgcttatcgaaggggttatcgtagtatggtggctttacgcgctgagctgagctgagtaaggtgtttatttggtatgtgggatacaatgcagtgggcttattatctttggacttggttttattaggtacctagattccttggatctgtcgttcgggcttagggtgggggggggggggggggggggggtttaggtgttgtgtagggtgtgattgttccatgtgtagctgagtaggcaatttaaatccttgatgaggtggataggtatagaggatcatttatttaactttgaggagtgaaatatgatagatcttactatactgttgtagattaattgacggatagagaggtagatagatactgtagatagacgggtagatcgatattaaggtacgtctaagcgagggtgacgttcctatgtagtttcttggatcgggtctttgtttatagggatcgggttccagcgtatttttgttggtgttggatgtattctaatattaacggctattgttggcgttgggaaccgttctataggtatgtatgtatgcatccatgtatgtactgatattactagtactagtaggatgtaggtaagaatgtatggattgtgcttatgtgcagatatttcgtttcttgtttattaggggggggggggggggggttaatgtttgtcatggggtggtatctattgtctccgtatatggtatgttctctactccgtagtttgagtgattttctgggagttgagtcggaaatgagggttcgatggttacctgcgaggtactccgggtaggttacgcgattgggttagttctatccttcctattctccatgaatttcttaggatcgtaattgtcgacgcggccaacgaacaaaaggagaagtacacgggatgtccacttaaaagcgataatcacaaaattacccaagaaaaagggaacgcaacaacttccgagacataccccgagcaacctatatgaagacattccaacggaacctagacatctccaaccgccgcgcgggtggctgagtgcgaagaggaagccttacccattcaattccatgggccgcgttggcaacgcaacgattaacgcgttctaccatactggtagagggccaaatccggtaaccggtcaatttttaatctctagggacgaaaatagccggttgaaaggagcacacatacacacgcaccaaagttactttaaggccggcttgatgaattgtccaccgtggatgaccctgtcaagtgccaacgagggtcgggagtcgagactacgattggatcccggttgagaatacgaggtaaaaaagaaaagccctggggaagaagtccccggataaccaaaccaacctaacgattaaaactcacccaccccattcttttaacaaccgccttcctcccccttaaccgcggaccgcgctgggtttagtgagcgtaacggcgggaggacaaaggaaaagcggtgttcaatagtttgggattccgggtcgacccaagtttatggttagtcttagcgatggagtcttaagttaaggcgaacaatgaatacaacggttaattggggtgtgcgtctctgtcggagccgttttagccgtcttggggagagctggtacctaagtggaggttgcacgggtcagatgaagtcattgctttttttttcttcttcttttttcgcacggggattttcatgcgtgtgggatgggtttgtgctcagcttccagtgagatcagagataacgtccggagtacttgctggactgacctcagttttggccccacgatgggtcgagctgtgtgtaataggttgccttgttgaaggggagaaccggtctgttgggtgttgcgatgcgggattaagggagaaagcaatcctgctaaccaagtaaactaattaaaatcatgagaaaataaaccgggattgaatggctttttggtcttgttcttgtttctcgttctcgtggagagatccacgtccagcttagggtttaaggccaaattgactcatttgggagatcccgtgattcgcgagagtccaagagggcaaaaaaggagtggacgccggacgggaaccaaagtactaactactaactaactaaacgaacgatgcagttttgtgattgcccgtgtgcaagtggagccactgacacctgacaggcgagagctctctgtacctctctcggtcgacatgcaaattttaaattgattgggggaaacggaaaccgtccgatcccaccgctactacgaaaagatatctggcaaacaaatcacgacaaggacacgggctggatctgatatgcgacgagctgggaaagagacttcgcttcagctgtcgatgccttgttgtcatcatgaggttaaccaagatgagatcaattcgtttgcgtattattggggctagctagatagtacagctcccagtggaggaacctggtgggatctgtggatgatcgtctcgcgacccagcctgtctctttcggtgcttttctttttccatcgatcggacaattaatttctctgtcaatttggatcagtcaccgggtaacaaaggaccacatatcctttttcttgggacccatttccggtccttcactgatccagatggagaccttttgattgttcactcctgcatggatcttgaatttgagtagggcctgtgcattgatccatcatacatccgcggagaatcgatctgaggcttagaaattggattttagtttttatttttattttttccctttttttttttttttttttttttttttttttttttttttttttttttttttttatttcttggatgtccctaccgatgattattatagttcttcatctccactccccagaaaatccgcccccagaaactaggtcacagcctctcacctgacgagaccagttaatcttctcatctgctcacctcttccctttcctcttcttctcttcttgctgacttcccactttttaccccatttatcttctgtcgaacacatactccacctctagcgaaggcttattgggcctgttttatatggtggatgtggtttccgtgctggcagtcccccacaaacgccaaatcatgcctcgtatccatccgcacgcttaaagggacgagcctctaactcgacatggtctcagggcatggtgcttcgcccgggaatggtatcaccgggggttataccggcaacgacattggtttcaagattgccattgcgaccctcgccgccgtgacctggtacaatgctatcgaactcatcatcctcgttttcgtcaccttcagtcagtaccacggcctttacttctggagtttgttcattgcctcctcagtcggtctcgtgccctaccaggtaggcttcctgctgaagttcttcaacttgaccgaccaaacatggctctccgtcaccttcatcaccatcggctggtgggcgatggtcactggccagtccctggttctctattcgcgactccatctggtcctgggcaatgcccgcatcctccgccgcgtgctcgctatgatcatcgtggatgccattatcctgcacattccaaccactgttttaacctatggatccaacctggccggtggccgggccgcctacatcaacggatacaacatcatggagaagatccagatgaccggtttttgtatccaggaatttattatctccggtctgtacatctgggaaacagtacgaatgctccgcctggaccccgacagaggcaaacgcaaaatcatgtaccagctggtcgccatcaatctggtcagtatcctgatggacgtcggcctgctggtagttgagtataaggacatgtacatcatggagacgatgattaaaggcgtggtgtacagcatcaaattgaaattggaattcgccgtgctgggcaagctggtgcatctcgtccgcagccatgtctggaagaccgagtcggtcgcccgccccacgtcggacttccccgatttcgtcgacgcaagtcgggttacatccgatctcacacatgcaatgccagccgcacgccaccgctcccacccctggatggacacggacgatgtttcaatcgccatgttcgagcatgccgggctttcccgagatcatgagaccggccactcagaggtgtcccattcatggagcggcgaaacccacgcaaatcatccgtatcccgatcgagaacttagtccggtggactttacctccctacatcaacagaagagcctcccgtcgaaaacgtcgacagaaagtccggggtgacaccctagattctttttcccctttgatcccttaccctcggaaccccccatcttcgtccgtctcctttacctgactctcaaccactgagttgtctttctcaacgaatgacgaattatgagatcacgacatgcaaaagcctcttaatataccgagcatatacatatacaggacggaagtctacggtgagttcggatggacagaactacatacagatacacatgggaggaactcatgtacaaagtatacaaagtataccccatcacgcccggctctcgccatttggacgagattcctgccgtgcatatatatacacacggcagatgggccgtatggaggacacaaccatgcctaacaaataggcctaccagatgaagctggattaaaatatccaggttcaagtacataattctacgttaaaataacaataaacaataccaagttacaaaacacaccgctatgcatccagtgtataaacttcgggcaattgtcggagttgcccgccatagatttgataatcgaattgtatatcaaactttgttccccgcgatccacttctccatactaacttctcacctccatggatgtcaccccacgttccgaaagtcaattaaatcccagttcgcacggcaaatgtattattggattgtttcctacgcacctgtctcgtctcgatcgggtacatcgtgaaatcccttgtcggaatcgggttcctaggcgcctagtgtctattctggctcccctcggtctggttagtgctccaagcaacaggaatatccaagctaacaatctctgggtctttctaagccgcacacggtgatcgccactcagatgctgcacgcatcagatagagcttcgcagctttttgttcaagacgaaaacggccgagtcagaccggtgttcctgcgggagagctcccagaccctaacatatgccctcctgcaatatccgctgtacattgatctgtgcgaggcgttgcctcatgatatagctgggattcgggggctacgcggcaaggctacagactatgaggatattatatcgcacccgcaggctatccgtacgttgccgagtttatacacaaataagccctgggtcaattttgcaaggtggagctgacacagagctatgagcgaacaaccacaggaacagacggcgaacatgctggttaaacggtcacgccatgacctacggggtcaacctaggctgagatctcacctacgtggaactatatggcgagcaggggaagtgagcgcaaggatggtgcaggtatattatcttttcataactgtggaaggcgttttggctgtgtacggctttttatatggctccacgtcgttttcttatgtatatctgtatagtatgggcttctgggggtttctgttcggcgtattcgacgcaaattctgactcaccagcgagactctaggaggttgatggaatcttgattgattgattgattgatccaagttaacagatggcagtcttcctttctaaactccgttttgcactcggcgacatgtccagagcttccgtccacattcgtcttgagcaaccttccagtcgataactacttctactcggactacaatgcggctgagtaaggtaagtcgtcgtcacaagtccgtttccgggccgtgacttcagccaagtctgcccacgactgatcgtcgcctggcccggcggtaatagcggcgtgtgcgcctatgttgctccgcagaatggtgccaacggtagtctcgggatccccgtgacggctcgaccatcggcgatcccctgtcccagtgtatacaagtccgggatggtccaagtatcctgatatcggcgtgaaaggtgtcttgcacatatactcttccgcttccctgaccgtcccgatcccgggtgtcagcaatgctatctcgataaattcagttacattcctgacttggtagggggcatattttagatttcttgtaccgacactgacaactccttccaatgaataggatcgtggagaagtttctcgattggtctgatggcactctgccgctggtaactatactggaagctgtgtcttgtaatggtttcatgacacgtttcttggggcgatctgtcgttaccgggaggtagccaatgttattctggagtcgtgcagcgacatcgcactctcgagagcaacaccctgagtatcttcaacatagacttactttggcaggatgacaggtgggtcgtttggtgggataccttctggacacagtccactgatgtcttcaaaccctgaccttctcggcctcaaaagcagtttcatcgtgataacaggcgtaggcaacccccagggcatgcattgggttcgaagccgcccgcggatgcgccgaaatgagcgcctcgaccatctgtttgttgcctctgtctaacacaggatcgtgcagcgacgatcacaatcatcattagttctcaaaacccctatgtgcgcttgtgtctcccgggagcgttcattccaacacttatgcttagacggttagctacagttatgctttgaatgaagatgggaggtaatataggacacaccacgaaatgatgcctcacggtgacatcgatgaagttaactattgagatgggagtgccatataattcgccgtatcgaagaatcaggcttctacggtgaggatatatcaagttcttcttcgtcagaaagatttactgctatgcactttgcagcgtcgcggcaatctgcttcgttgggtcaaaatcactctctcatgtactgcctcgcattgagccaataagagcggcttttagccattggcctcagtggatgttgccagagggacggtgtgacaagacgttgtctaaccgaccagtcctatttctgatcccggagatttacgggtaagggagaacccaaaatattgaaaaacaataccaaacataggggagcgagacagtaaggctctccatgaggtcgggcaaagtgaacgtccagcatcgagtctggtcgcctgtgattctgagaagattgctgaggcgtgagaggcggaggtgaaagttcacctgtgccaccagtcgatgagagaccgagattttgaggcatgtactaatgctattgttgaatgactgctgtcacattcatagcgcggtcagtccctgtcgaacaagtttggttctcgctcttcttgtgcgaggccattggcaggggaatccttgcccgggcactgtcactacgtgtgaatccagtattaatcctgtctggttggaaataggacgacaacaagcatcatgaccatagtactgcggaatgattaaagcatcaaatggtggatatattggaaaggcttgtaaggagagcttcagtcatctctcttggtgttctaaccaatgcagaaagtgccctttactcagaaatctctagggtagtaacttggcctttttcacgtcgtggtactcggttgccacatacagcccctctacttgcgaactaagttgatatcaatctgggtaagagtccgtcttgagatactcttctctgacagagtcatattcactgaaaccaccctccgaaacgttgataccaaagataaccaaataaagattattataaatcgccaggttcaatcgatagtgctaatggcctgacaattaatcccgctcaccttccgcactgacaaatgactccagatcatccaaaccaaaaccaagaaagcaagatttccacatcaacttacgaaccgcatttcctgaaagacatccccttggagctacgctggtttcaggcactggtcctgatggtcgatgctaaacctccatacccgaaggtcgacaggccattcaagtacgctaatgtcttgttcctttccaatgaaccatcggtggcctcgctttcatagtcaagcgcagattctcttattttataatattctatgtaagatctggatatttatcgatataatatctagaaaacgtatgatatttactctagaaacccagacaaactatatattcaacttaatataaacataggctatccacatgcgaagccgccctctgttccatgaagagagcatccatcccccagtccaccttggtatacttcatccaacacgatttattcttcctatggtattaacagctagttacatagagctgatatgatgttctttcgagatgttatattcacaactgatgacactctacttcactatcgaaatatataatgagtagaggagatggggtatacgcgaggatagcataggaaattctactatttatacatggggtaggtgtttttgttatacatagttctatgacttggttatacgctggttcgttaaatatatctatctatattatatgggatttgcgggcttgttacgtgtagttagcatatattctgtcgcaccggcgaggcacctatataggtagacgatggaatcttgattgattgattgacaaccgtgaatcctgtgttctggaaggagcatgaaaaggtgtgttacgtgcatgacatctatgagggagggcagctggcggcagtcgagaggttacagggacttctcgacgaggtgcttgcatttattgagcaagtttggaccgatcgtaaggacttctgtagcgaggatatagcgtgtagtgatagatctgaagcatatttaatcccatgctggacaaatggagatataaagcattagaagtacattagtttataaccatgtacatacatccctaaccgattactgccctagattatatcccaaagctccataaaacaccaccatccactactaatcactaaaggcaaaaccacaccaacccgacatcataccttagtgaatccatcaagcagcatgcatgcattagcatacatcatccttctgcaagatgcccaaaggggcgagtgtcaagcttacaccatcggttctagacacggaagagattctgttggccggacatgaacacaagaaccagtacttttcatctcccagcttttgctatggaactatgattccgaccccgcaaatgatggcatggtgagattttcttggggatgggaattgcatcggttctggttggccgtggatggtttcgctttgagttctagggttcgactaaggttggggagggtgtggtttagcttgttgcactagtacttctgttggactcgtgttgatcgcggagtggatattttttgcttattgtgtactactgtagctcttttgattttgatattgcttgtgtggagagatagatgggttttgttttacatggtggagttgatatggtagatgtgtgtgagagggtgcatatatacacgacttactgagattgtaaccctactcacctaagcacagtataatacttagtaaagaacaagcacacctaaccactggatcaaacaaatctcacctcccaacctcaaccagaccacccactgttcaaagtcatccctccatacacagtgtatttcatgaccaaaagatgcggggctatcgaattctcaccccccaccctaaatcccccccggtaacaataccccaagtctcattggcgggacagcatccacacccctcctttttcttcctcgacctcggaaaacaaacttctacccgaagtggactagaccatgactcgatttactgttgaaagtgggtaagtggtgtcatggattaggtagtgaacgacgtaagtggttactcagcctttctcttttttcttgtcaaccttccttttcgggcgttcgagctaaactattattagactttttatgtttgggttatgttctgttatgttcttgttatactccttggaggtatgtaggtatggatttgcatcgaggcttggatggtgtttggggtatatttagatcttttggatcgatggttacgtatggaggtctgtctataggggaaagaagggggagcgtttgacacagccatagttttgtgatagtattattagattggtgaagttagttggaaggagggtggtggtggtttagagaagctgaaaggatggttattgcattactcggacatcaggagatctggactgatggtggccaggtacagtaagtacctggtacattccccgtccagtatgctgcctagtcgattctacctaaacttcagtaccccagatcattaactgaggcaaaaaggggggcgaaaccgaaatctttgctcggctggactttcataaattaatgagacgattagccgatccaaagttaataggggtaaggttacaggtgaccttgtgtaaggaagatgcatcgaagacatggatatgtaccttatgattgagaacttgccatgtgccgagaacctttaggtggtcttttatttttttctcattcattctgtaacctgttgcctggcgcctgggaactaccgccgtttcgggaatggtgggttccacagggacagttggctgagtgattcttcttgcactaccgtctccggtgattaccttagttgcctatctgcatttctattgaattgtataactagtagtctactagtatacggtagacacgaaggtcggtaaatgaaaataggcggtaaccaggcaccaggacctgtcatgagagtcataattcaaatatttgcttggggacctaaatttggtagaattctgtaggtacagccacggccttacactgccttgctgtttgggctgtcccgaacttagtaaagtgtaaaaaaaaacttctaatcctccggtggcgcggactggcaaatggccaactccagaagcggtggttggctgaccaccacccttttgggccgttgacgagcgcggcggaggaaacatcactggctccggaccaaacttcttcggcggctggggacaatgttgcagtctgttgcactggggaaaaggatctcatcctgattcatgtcgaatagttcttacgtcgtggatatctggtcgcccattgttgattcgcacctgattatgactctattgttattagatgtaatattaccgtcgggaaggcatggatgtattcttattagtcttgtctgcaactatcatgttcgacagcatggttgacagctgtacttactaaggttcttcaaactgccgatatcgcgatggattgccggtcgagtcattcggttttgatatgagggtaccagttcgatgctctatctccatactattgatatatggagagctactttttctggagagataggatttaggtatccactacgataataccgatcgggggcgattaaaattacgatattatcgtctttggattctttttcaatgttatgtcaaggtatatatcaaagtctaggttattattaagagtaatatcatgctgcatgtaactgagcgagagcggccctttactacagaaagtgaccgtattgcatggtgaccgagtaacatcaaaaaccggaggtgatcgattcgatgaataatggctatcaaatattgaatgaaccagatgatcaagccccagatgatgatttgtcttttgatgagaaagaaaaatgtaataagaaagtaaaaaaagaaaaaaagcggatctttgcaatgaaatgcccaattcgggcccagaaatccctatctcgggtgaagagtgaaagagtcatactgtatcatccgttcccgatcaacgtccctgcgccctgaacctctaagtaccgcccgtcgccgtactgtacgactcagaacactacgtaccgccaacagggctgactgactgactctctccgtctcttccttctctccctccctctacttttcctttccctctaccagtcatcctttctgaagaagggacagacaacctctttttttttcttttctgaagagtcatatctccccccttatctctcatcccatatgatttatttttgtgactattaatcgatttttcttgtttttctttttcttgtcacattttcctctccgctcatcagttgatttctatttttctcaagcttgttctttttggcagaaaaacgtggtccctgcggtccgctctgttcctcagtttccgccactcttgccacaggtcacggtgagtaacccccattccctctggagaatctcctgttagtcacgttcctttcatatcattcccttttccctggtgccactggccgaatttcttcctgatcttgaaatttcgccatcccctttgcctgctcttcccttccacttctggttttctgactgggtcgcccccccagttagtcatttacctagtctaccgctccgccctccgaagaataggcagcgcacctgcggttccctgacacttgaagagtcataagcatatgaaaaactggggacttcatagttgctgactgtacttgttcgccatcagactatagtctatcgcctcttaagagcctcttgacagccagctgactgcctggacaagcatcagtctacataagtggatctgcctgcttgctaacagtccgccgtcgtagcggctcttttttatacctacatactccccacagtatcaagatgtaccttgttgtttcgaaatactttgttccggtcaccagtgttgcagaatcctccgcctttgatctccgaaagtccgacaagtctgttactctcatctagatcgattgactcatacagcacctgtcgtcctggaagtcgcgtggacccgatacgctttctacgtgtcttttgtcgtacgttactttggttgatctgccctggaatctacaaccggtgatcggtacaatacttcttgtttgcgcctcccttcgattatttccacctccatacgtcctaccctaaacctcgatatacgttctcaccctctacctgacctaccttgacatccaacgatagttgaatgaccttttaacctccgatctacccgcccttttttgatacccatacaccctggcgatttttctttccaaggcctgccgtcgcctgtgaataaaagacggttcttgtcttacagcgtctcgttaacggttattgcacaacggtatatttgattttctcacggtttttaaacgagcgcaccttgccgtatccacacaagtttgccgtccacctgattggtcatttgagttacttgctgttttgaagtaaatcaggtcattcaactggatagctccccggaatatgacagggattgacgttttgggtttgaaagatccaaaccctagtgtttcatacagagcgtcgtatgcgcacccttacgcatcgtccatttcctcctccgcatcttcctcttcgtcgtcggtgttctctcttgatggagtctcctcccacggatccatctcttccgcctcgacgaacccggttgatgtcatctgggaaaatgacggtgagtaccaaacagcaggaaggggactgggcccttcgcgtgcgcccttgaggggcaacgcggtgaaggctgcggatgccgccgttcctccggaattgcgtaagcatccgcggcgtacaaacagcggtatccagtctaacggcgtgtcctgcgcgcggcctccgccctgtctgctgcgtcagtcggagcggaaagtgaactttgtcgacaacctcgtcggtaagtgcggttgaatatttgtcgggtacgatcccatagctgaagatttatatcaagacaccgcgtcgcagatcgtcgagaccatctggcccttgtccgccgtagcgctccgaagtgattcaactacaggctgcaaaggtgttttgccccttcgcaccttcatccaggagacgctccgccggtcgcggaccagttatagcacgttgcaagtggctttgtactatctgattaagattaagccgcacgtgcccagtcacgatctggcccatgaccagactcggagtaagcccgtctgccgggctatgcagtgtggtcgacgcatgttccttgccgccctgattctcgcctccaaatacctccaggaccgaaactactccgcccgcgcttggagcaaaatctccggtctgaatacattggagatcaaccagaacgagttgatgtttctgcaagcagtggattggaaacttcacattcccgaagccactttccagcggtggactgatattgtgttgaagtatactcctggtgctggtatcatacccggcgaaggccagacttggcggacagttattccaagacttactcctgagttggaagagatcgactttgagccgatgactcccacaagcatggagggttccgattccggatcgatggcaggctctccgtctcctcgtggtacctccatgagaggctctttcctcccttctttcgcgagcgagccctccaccctcccgtcggaggcacctgttctcaagcggactcccccaactcttgagcaagcctcccgagctgacagcttcaatgtatcccttccgtcgttgccacggcttcctacgctgcctactccgcagctgacgccccagtcgagcatggcctccactcctgccgcgagtgctggctccttctcatctcaccggcgctatttctgcgctgccatgtcccaggcgcaaaacatgtgcatggcgcggtcgacgctcgaccagcgcccgtcactttcgttttgcccgaagacaggctcgtttgatagctaccccactatggtacgccggtcttctctggctcgctcgacctcttctgcgtcttcgccagattcgatggtttcggatgtctcgactctgtctgctaactcgtctcggtcctcttcgatgtcgtcgactacatcgggccctgtcttgcctcggctggccattcaggctacccttagatgtactaacaattcgatgaaggagagccggaaggctgtggccattgcttcccccatcgatgagagttcttacaacgacatttatcaatcccccgaaagctttactgggtctactggacatgtttcggagctgtctaaattttcactgggaattcctgttgatatgacatccgctcatgaggctgcccagagcctttgtgcgttgtctggttccgctcctcgtgctccccagacgaatcaacagagcggaaatcagcgccagtgtcggaaacgcggtcgcgccggatctgacgatttcgcgttgcaaaaccacgtccgtcatctgatgcagtccaataccattactgagggcactgtgttgcccgatggaaacatgaaaggtctgttcatgaacgctgggcctcagcgcactcaatctctcacggctgcccaactgcacgctcttaattacaacgttccactttctggaccggcaggcatgaagcgtgcgtgctgcggtagtgaagcgagaaagattgcactgaatccaagcgtgcgcgcggattacttaggttagagattcgttcgctggacggaacttttatgcagtggacaggttcgccttctgttctgttcttttcttttcttttttctgtagaaaggaaaagttattgtttattgcataatatcctgaactcgtcgaccgagtgatcttgatttagcctcaacgcctacagagggcggaaccgcagacatccggtgggaaaagttttgtgtgaactttatctcatatcttctttcgtcgggaaacatctcccgtcttgtatataccctggtgttggttggatttggttggaattctgcgacggagtctgcgtccacctctgtctggtgcagtggtcctgtaacccgcagtccacttgtgtatgatctatgacggggaggttctatcactatcttttatcatttactttgttccatatcgtggatatttattactattactactactatcatgaactggagtgtgcggcaatggcagggtttcttctttgtgtgctttgttctcttggttgtttgtcatctcggtcgacggtgtagcggcggatttagtgttctacaatgcatattttattttctgaaggagttttctggtcaaagtaggggttcttccattgtgtctgtgactggttgatcgagggatatttgggctttgatcttaatgcctctttgcctgaggccatcatcggtggattccatcgtaaggcctttacgcaaggagacaaccaagccatggaaccagctggtagtcgcctctagtgttctcatgaggcacctatctgacatggtctcgtgatagaggtcatgagtcaccgaactggctattccagttctctgtgtttcggtgagcatccgacgatcgagtggcgctgcaaactaccggtgagtcattgtcatcctaggcagcctgaggcaggcatcaatgccggagtgtgccggaacctccggatggaatcggatgttgcgctagtcaggtgcacagtacgcttagctatatacgtcctagcgtaatcagataagatcagatccggcgttgttgcagttcccctcacagtcaccctcatcatcagaccatccggagtccaatgtgaagggacaattcttggcgtagcttcctccataacacatccctttcctacaagctctatctttgctttaaatctctactttacaggtcttacccatctacatccaaagcgaaggctcatcatgaagggtcttgaccgaggtctcgccctcgtctccacactagctttgctcttcgtccaggctgtagcggtccccctctcagctgccgaaaatgcctcccccgaccagacagtcctaggcgatacctacaactttccctcgacccccgaaaacaatgctgacaccttcgagaaagaccccgaggcagaagccgcaccgtcatggttcacttccaccctgatggcccgccgactcctcgctctctcaaccacaggcgtagcctccaccatcttctctcacacacccaaggacgtccacgtcccagccgccgtggccggcctgtccatcagccagaaagaatacatctcagactgcgacgaggccctgcccccttcaagcggcaacggcggcaacggcgacccgaccttcctcgccctcgaagtcgaaaccaccttccgcaacaccgctgaaggctctaacatcagcatcaccctcgactggtgggaccacttgaacgagaccgagccgctctggcccggcttcccgctcagccctgccggtctcccccgcgttactctcttcgggtacgtcgagtccttcccgtcccctgtcccggaggacacggaggcggctcttcggtcctgctatcttaaagctcaccccgatgcccgggtgtggctgccggagcggccgggctccccgcataggagccactgggtccgcatggttgtcactcaggtttattggattggtggcttcggcgggttccagcgcattgggtggatgaatgtgactgagtggaagggtattcggagggaggagagtttgccgggtattggggatggacgcggatgggaggatgtgaggcttcctggggagaaggggtattaatggtattgatgagtgggttgcgagctactggtgcttatgctactgtcgatgatatacttatgagtatacttatgagtgagaattgttatgatgttgggggcatgagattacgttgcatgaacggacatgagcatatggtttatacttttttatttgttaggtacagtatcatggcggtagcctgaataggactgttatatcattatatcgagacttatatctgaagctattgtaggggtctaatatgaagggtttatgacagatgcgtaccctccgcagtacagaggatttatagtactaactcagaatgcctactgccctaactaacaattttgtcgtctagactagctgctctcagacacattattcagacatgctccctataagaaagcagaaagaacgagatccactaatgttaaattacagaacctcttatccgcaagaggataccaacctgtcgagagcaatcagaagattgaagaattagatttcttgattcaaatttagccggacaatatgtatcagcttgagaagtctcgagaaataccctggctagtatatcgtaagcccgctatctcttgtgttaatatggtacagtggtggctagtgataatctttttgaatgctagcaaaaagtgttattgttatggcatctagtatataaacctgtgactcaaggaattgggattctgagctgaaatgtattacagttgataatcggttctaatatttgatcctgaaacctgcgtagttgaagttcttcagcagaaagtgctcatgggtaagtgtatcgagaccccacatatagcggatattcgttcatccagtgctgaagtagtattcacgacttgaagtctgtcttcacggataacgttgaatatggtaatatatagaacattattctgaacatctacatcctaaaatatatgtgactattgaaaagtgggttgatatcagctatgtaggtaaccgtggacgctgccgagatgttgcggcgatgacgtcggttgtccaggtggggtcaaagcgatacctcggataccttctgtcaaaaaaacaccggccttcctgctttcatccctcgaaaatcattcccttaccatactcagcaacttccactgactttacacgtctggtagtcgccaattgtcctgtcttggtttcttgtgcgttgtttcctcactaaatatgttttacaagcagcttctaacatctcccttgcgaaggtccttctcgtcgttgaaaaccccaccatcatcatttcgaccaattcattgctcttctgccgccatgtctggtgttagcaaagcctgttgctcgtgagtatttttacctttcaagattgacagtatcgaactatactaatagtttgcagtatccctcccattgtccccaagggctaccaggccaagggtgaatacaagaccatcaatggcttgaagacatgtatgtttcagtttagatggcttagtttactgcttttattgacagctcttagacgtcactggtccggaaaatgcctccaaggctatcctagtcatctacggtgcgtaaaaactactcgccatcgacaccccgcacccacatagctaagaaaagtcaatagacatcttcggtttcttcgaccagaccatccagggagccgacattctcgccactgccaatgagcaaaagtaccgggtcttcatgcccgactttttcgaaggcgagcccgccgacattacctggttccctccccagaacgatgaccacaagcagaaactcggcaatttcttccagaccaaggccgcgcccccaagcaccctctctaagatcccagatgttgtctccgaagccaacaagctcgcccccaacggcgagttcgggtcctggtcgatcctgggctactgctggggtggaaagatcaccgccctggcctcgggcaaggacaacaagatcttcaaggccgccgtgcagtgccaccccgctatgcttgccccagaagatgcgaagtcggtctcaatccccatggccgtgctcgcgtccaaggatgagaacccgaaggatgtccaggacttcggctccaacctgaagaaggagaactacgttgagactttctccactcagatccacggctggatggcagcccgttcgaacctcgaggacgctgaagtccgcaaagagtacgagaggggatacaagactgttttggaattccttcacaagcacgcttaagcgaagatattggactaaataactctggaggacttcggaataatctaatgactgatgccttgctgtccttttagtttattgtcttcgagggaaaaaattgcacatatttatgatttaccattttatatgaacgtgggcgtacgtattttagactgatgagttggttgacattagtgggcatcaaccacgttatactagaccatgtcacaatgccttttgattaaggtacattgtgtaatcacgtactccgaatattaatgccattcggcccgattagcgcataaatcgggcgtcagatgtctaattgccccattacttgtcatgccatgtagataaaaccgtccctgaggttcctactaaatcaggtaacttcggccggcccgtggtttgcccgacgtcatcgattatcactgcccgtcacttccaactcaacttcttcctttgttctagaccttgtccctgcattagcaatataagtcttgtatatataataagcgccgtcacaagagttgattcttcgccgtgtaaatgaggatatcgcttgacaatcagttcctacgctgcggatcgcttgtctttgggcaccaacttatagccggcttacctcggcatgccgaacagccagaaattcttttctcagctataaactaggtataggcatacaaaacacgttacttcaatacaactcgaagcgaaagacgatgtctttcttttttggccgtcggcattctgtctctggtgcgccagcagaggacgatggcgtgcctaggaatccgaatttgagattgagaagaagggcatctgttccgaatgcgccgagtcagactcgtggcactcatgacaggaatgtgttccaagatctgttccggagacatcgagatgattcagaatcggagatgtcgacagtggagagggaccatggtagtgtaagctttccttctcgattatattccacccagatagtctcatttagaatttggagtggatctgaccgtagaaacagactcatgcaaaccaatctaagcaatcaacggcaacagctgccaaaagtcatacgggttcccagagctccccgcatgcgcatgaaccgtctgcgaagggacacaaccaagagggtgttaataatgctacgccgtcatctgaatatgcgctcagcaaaaaagaaatcgagactcttttctcaggagccccattcttcctccttgaaaggggcaagtatgaccatcattacccacaggtgatcttccccttcgatgaccacgatcctactattcaaaatttgtgggaccgaaaaccactgcctcatccgtcgtatactctatgtacgttgcatgctcatctacctgttccagacaggtgggtaatctccaaagatgagccgatacatcttaatagttggaagaagaccggaggcgctaaaagagcgactttcgacatcggaatttttgaagtaccaaacatgctgtcaatgaatggaaaggacccaggagcggttgggtttcgtcatttcctagagctcccggttgcggatgctgtgcgctaccctgaagagccaaaggggaaattgaattacatacaactttcctcgattccagcctcggaggtatatgaactgatggagcattatcatgacgtttatgcactgtctgggggcgctccatatgaccggaaacagttgctctgcgatggcccatctgcctggaaaaagatcggcgtacgggacattaatctacagtgcttagtggaacgcctgcggacgttaacaaaccttcgtcgtgaactattacacggaaagaaagcaaccacgatccttgataccgaatctacccgagacttatacagtggcctattcactaaattcctctaccctccatccaaacctctgctcgcggactccagcctggctcatagcctcaaatctcaaattaaggctttgaccatgaccctcgccgcaaggaacgcgtgggtggattttagtcttcccgagtggcgtttatatgcaggacagctgctgtgggaagccggtcctcatccggacggtgatctcttggacccttctacgtgctcaaaaccctggatgcatccaacgctcgagcgcaggtggctccttatccagatgctcctcgccgcggaactgcttctccgtctcgatgccactgtccgggtggggattctggataattccaaggaattgcagatcaccgttcaagacatagatgatttcgagaagctacggagcggaaaggtagactgggacttggtggtggtacgacgctttatggatacgtttgacattagctacagggccgacgagcctgaccatcctggcttcgaccccgtagaacacacgggaaactcgagaggtgaaaagaatcacgagaagaattcacgctctttcttcgaaaatttgctccacagatcgttgtctggctcagccgccgagtccactgagtcagcctggaactgcagtctggtcccaacatacctcgaccaacagctccaagggttacttgtgtttggtcaagagattggctggccaggacttgatggactcagagcgggcctggagtctgcgattgggtcgggtcaaatgagtgaagcagtcactaatgcgtataataaaccagtacacaatatgctgccagccgaagctggtgcgcctcttagtaaagaggaaatgcataccagaagcccatcccgccggtggatagccctccactgctctcaagatcagaaggcttctgtgcagcttggtggttggattacccgcagctggctgtccggctttgttttccccggagagcagatcagccacctcctcatggctacgatattggagaatgactcagatgctctcgcgaaactagggcccattgcaaacctctacggtggatttgcgtacaatggaatgacttggtggagcaaagagtgtgttgtcggtcgagtcctggccagtctggaagatacgaaagagtgcttgggctggataaggagcgcggttgtgcctaaagatgcctggacagttcagccgctggacaattcatggttcgaggtttctgttcaaccgcctctgtcaatgcctggaaagccgcgcatccgtcaggggaataaattagcgtatgaatcaacaccacttgggcgtggtgagcgagtcagcggcgcattctccttaccgttggactccccgttggagaaagaaccgaagaacgtagtcttcgagacattgacattctctggaaaggacgggcagtcattggaaaacacgccgcatcccatcgtcgacagagcccttatgaccttttcgatcgcctcaggaactgactcaccctggaaagtctccttccaactgaggtacaacgtccggttcatcacgtctcacgaatgccgcccaccgggcaacttcatatcatatcactgcgcatgccccactgggagtggcacatcaacgccgtccagcagttcaagcccccgacatcaccaccgtctcccaggccaccctctccacagcgggtacaaatataaacacatatcgctagactccctccccgagcactgtgtccctgacgacgctttccttgagggcagtcaccacaacaaccacagcaaccacagcaaccatcacaagaagcacgaagtgctcatcgtcgacgcgcgtggcggccacgacagggaaaccttcgcccgagcgtggtgcgcttcacttggatatcatgctcttattggcagagttggacggacgtgtctagcgtgctgcatcagagaagccagggctattagcgtgaaagtcgttctgcgcgtggatggcggtgtcaatcggtctccgtatccgtcttctcagacgttgcctggtctgaaggagatctaataagcgtttatccgttggtgagttaatgctgtagttgggagtgctatagtgaggggtgaggggtattatttggattggagtaggttatatatatgggtattataataagagtttatttatttatttttctcttctaccaaaggattgattgaaatgcatcccacgcagagtgcagagtatcaagtctaccatgaaacaacctctaccaaggatccctcacagaatgtaaaacagtcacaagtaaagaatataaaagaaacctcaatcaaaatatacaaaaagccaatagatcacatattattccatctgatcacacaagcgaggtatacggagtagtaagtaaacctccagctaaagtatacatgtttctactaccgccgcacccaatcactcccaaaccccatataattccgatatacatacttctaattagtacttactacttactacccaaatctcaaaccaagaaagaagaaccacctccaaaccccaatcaatacccaaactccaatctccaaacaccaaacccaataacaaccagcatccatcctacatttcttctcaagaaagaagaaacaaaaatctcggctagtaaagaggtaaccacctcccgaaactaaacccaaactaaaccaaacacaccaccttcttcaaatcacaacccaagaaactcctcatcctagtctcagtgcacccccaagacataaccccccactactctagcctctatagtcctcatgcattcattgaaacgcagagcatacccgaatcgagtcaagtgcccggccatggtgaaacgacgaaggattctggactcgcgctacggggtttttgagtttgtgtttgggtttggctctttacgtggcttttgcttttgtttttgcttttgggtttagtttgattttggttttggttttggttttggttttggtttaacagtgtgggtttaggtttgggtctaggttgtggagggggttagcctgatatggttattggtgctgttgttgcttggtttctttttgtaccttggtggtttttggtggtgggggtgtgattaaggtgtgggttagtttggttttatttggggggttggtgttgctttgcttggtttctttgtgtgttttgtgtagttggagtatatggggtgttggaaggggttattgttgtggtttttggttgagtgagtatcttgttcttgtgagaatgctggttctgatctctgtggtagataagggagagactggaatgggaaggtggtttatctgtgatgggtgtttgtgttctcgttacggttgagactgataggagtcgtatatctaggcaagttgtaggttatccttgatatttcgcataagaatgagggggtggtagtgtttagtctggttgaagtataaggatgttagtatcagcaggtatgaatgatctggtgtggtgcttgtgttagtgttcgaccctccgagttggagatggaaatgttggtatactctgccaattgtagaactgatcgtgtactgtcatgaagctattgtaagttcaacggttttgatacacatagagctcggtatctgggataactaatatcttcagtcattggactgacacttattctttgtttccctggtattcgtgaagaggctggagtcgttatacatctaccctggcaattcaaataggacaaggttccgtcttcagaaagtagctgggaataagcgcattgtagtcatgctatcccatccttggagacagtccctaaatgattttttaatgatagtgttcccagttcacagggccaggacataagtataaccaacttacctccaattattctttcctagtgcagaaagtagacagccttgtctagacaatgtcttgcatccaggtatgccgtacagaccgagtggatactgatatgggggcgttctgcacgaacggagatgcctaatcaggcagactgatttcgccgtcccacaacacacgaacaagagcaacaaaatttgtaagagctggatttcgttcaggtgtctgatccgtttcttatccgggtgtagttgttctttcgtagtttgagataggtgttttcatattcacattgtacgttgcgtgtacgtgtactggagacgaaggactcatgaatccctgagggtccgaatagagtcgcgtagactttctcatcgtcgctatgacttctcatcagtagactattagacaaaccctcgcaagtaaactgataaggctgcccagttacacttaactagtaacgatttggtcgtatgtagtagtgagtagctgtcggcgaccgaaatagatcaaggtgtcaacactccaataacgcttgcttcgctccgctgcgcaataaaacaaccagtattaacctcaccgacagatatccccggcagtcaaccagggaatatacccgatagtcccacagcgacggggaccttcgctcatggaccaggcatgctggatacggcccctccgagtggagacctcaccgaagctctaaatctgcaccatatgcgatgaaattaagctggcactagagtcgagccgctcgattgacacagggtgcaagacatcggtccctgaggcgggtagttccgctcgttgcgttcctgttccggcatagttatcatggcattatggggcgtggtcttggtgttggtcgatgtctagatcgttgaccagagacaccaagctgcgggtcatatatccgcaggtaatgggggttcactgttaagaacactttgcgtcgataggggtggaaagggaaggattacggaagaggatcacgtttttcctgtgctgaagattgttcatcatgttgaccaatgggaatgccagcgtcgattgaacaagacgcaggtactgtacttcatgcggattggttggttacagacatgaaggatgcgctgcgccaagttcagccggccaaattactctgagtacacctcagctacgcaacagctcctttaaccatgtacggtagaaagtccgtttcgcgctggatggtccggatatcgtccctaatgggaacgcgatgcatgcgtgtaaaccagcgacggtgaccaaggaacggtggttcgcagaccaagacgatccattgccgatcgacataccatgacaagcatgtgcaagcatccagaagggccctagaagccccaggggaaattatcaaccatggaaattacatttcggagggaggatggcatcgcactatgacaagggctctagtctgaatcggtcgctaggtccgggcaggagaacatcattggtatttcttgttggtttgtttttgctcaagtgatcgtggattgagttacagttggatccgtggcactgagaagtaccgtacttattaaactactgtggaaagcaagccatcgttgttggtaaggtctcgaacggagaactccgtatattagtttgacttagggttcgtggagttggatcggactaaaaatcctgcccttagagagagtgccatttcgatgaggcaaacccccgaggccaccaatcatcggcggcagggaagatttatcctcggagaaattctggaggtaaagtggtaaatgagaatggatattagtccctgcagcaagaaagtggagggagtcttaccgagggttgaaacggagctgtgcccatgtgtcaggaaagtaggggttctatctatagtaatccatctccatactttaaattacttcttgcatggttcaaagtagatatccggaaccctacatcatacatactggagtcattgctctgtgagagaatctggcggctgcactttagtccagagtcatatccaatgagacaaacaagctcatcgatgtattgacccccgtttgtttcatcttagagtgggcgttagcagatggagtagcgatagattaatgatagattaattttcggcgatctcgtcaacgtcgcttacgtatatcgcccgatcccactgcacagactgaccaaacgaggaattttcacggctatagcagttcctactatgaatccgccacaattttgggagttattttggttcagtttgatttattttcttttattcatttattttctcttctctcatcttttcctaactggtgcttccctccgcaatacgaggcgatccagagaagtgaagcgacaacaatcacgcagaaaaagaaagcaaggagaaaaattctattcgattgacactcggagatgatactcggtcggtataaaatctcccctagtctctggatacgtagaattgaccaagactaaacacaattcggatggtatcatctccatcatcgaccaacgttatcctcattaatcgtgatctcaagcggttcctttccctattaggagacgctaaaggaacggccttactaagtatagaagctaaaccaactccaagcccgacgtctcctcacatgggctcgggtttcgcttgcaggaagtgaaagaaaaaaaaaaaaaaaaaaaagaccagtttcatcggtagactgccgaaagcgttaagtggtcgggcattggagactaaattaagacccgagtctaatctctggttcaccctcatttacttacgtagaaccttggaaggcggatgcccgcggacactctccgtggaccctgagattaagcaatgcttgagcttcgtcgtcggttgcttgaacaggagctcctaattctattctccatatctatggggatgtgggagatggagggttcttggctggtcgtaatacgcgatcgcgaatcaggaaataatgatgataatactgagtaataataacgcatacttgcgtacgtccggttagagattgactttcctgacggaggcgattggtagggtggcattgataatgtaacggtgatggagatattgatatattcgttggatatacctactataaagaagagactagagttgcattgttacggttcttaatatcgacggcggcttaagtctgtgctgagatggtgcgccgtgtgtcattctattagttaccaatcaaatggtcttgtaagccatagggcaacggctaatttactgggaaggaccatgaggctttttatatttgcttttattatatcctatatgatggctgtaaacacatagcttgtacatcagcagtggtgttaactttttttttgtttaatttttatttcttttctttgtaaaagtcccttacagaccagtgtactaagccaagaatcgccagacgccctaagatgcagatatgatccttaattaaaccttgaccggcccacccctttctgacagatctgtactccagagaacgaagagtcggacaaagtatgcacggtgatcaatattgcctgcaggagagggtgtgatattttccgaccaatgcaataaaacagaattgcttgttttgcaatgtagtccagaagttaatatatttgtttgtagcaacctcataccactgtaatgaatgacaagagttgaaaaaaaatatagaagaaaaaatattatcaagataaaggtgaaacgctcatcctcattaatacatcgtgtggaatccccattcatcgactgggatgacgatgaaattagtccctgccccatagcctggggctgttcgactgacgctgattggtgaaccataaaaaaacgatgacgactccagggcttctcgaagctcagcaaagtttcgagggtccgtttcgacttgctcgctaagcctctttgggttccctgaacacgcagccaaacttctcagcacccaaaggggaagctcttctacgccaaggcatcgttcattggcttcatccaccgccagccccataaacccttcaccaatcacaaccggtagggctctggccaaacgagggagttaaatttaatgtctccgagtcaggctccaatttacccccccatcttttctactccttcaagattacccatgattgacaggtcgtagactttttcaggtatctggactttcatcgatgggttctgattctcctttttagttttttattttattttcttatttaccctttcaaccttttctttgccccttaaccaactcactgggaggggagagagagaggagagtaatggggaaacatgcctggcgaagactcgaaggaaaaagaaacccccacatcccccactattcctgttacagatgtctgtcacaggcctctgggaccatggttgcgttgaattgggacgaaccaccgcctggagtggctggagaaggtcaggggagagagggggggggatatccgatggcctgatggaatattgacgggttttatatctctcacgcagaacggtgtattagggacagtagacatggggagattgcagggaatcgcataatcgtacaaagtattagggtacaacatcagacaactgaacaagagggatttggcaaccctttaattccagcctgaaagaaagaaaggaaagggagtccttgggtccaatgtatcaacagggccaatggcgttccacagccacattccaatcattgttcctgacaagactttcaacgtcaccggagtgggtggattggaatctatctggggaaagggtgttcaatatagattagaacaagtgataataataggaatcacattcatcatcatcatccttgcacatacattagactgatttgttttttattttttaaataaaaaaaagaaaaaattcagagagattgaggtgtttcatctgcagtttagggcatagtgctattcttttaggctgttttattattcagggtctgattctggaaggtctccatccagtatgtaattccatgggggagggattcatcatcctcaattcactctgcccatctataattatctttagtatattcactgtccagattatgttcatgattcctttcctgtttggctcatctctgttatccactctcgaattttttttctttttcttttttccctctctttttttttttttttttttttttttttttttttttttttttttttttttaattttttactccgtattttccctcattttctttttgcatttttattttattttattttattttacctttcgagtctctttgattttattctcctttagtagcttcgaatttcctgtccccctttctttctaagccccctctctcacttatcctttgaagaaaataattgaaataaaatttataaaaaattccaaccagcgaaataaaataataatcgtaaacataaaattaatctccataattaaaaaggaagaaaaagaagtaaaagtcccgagatcctcgatcccgaagtgtaagtaggtaattcattgattattacgcaccgggcctctctcgctttctttcaggtttactttctttctttctttcattggtatcgctctccaatttggctccagttttcttcttaattattctcacgcccaaggtttcattgcgacgaggtaccttactttcttttctcccttttccacccttcaacgtattttggaagaggtctctcctttccctggcatactcttagttgtcgacttgatctggatttttatattttctattattattattattttttccccctctcctattaatattgtcttttataatacctccttcagacccgtgggcggagacggtccttgtccccgtgggccaatttaccctcaaccaaccctgcgacatactaaacaactattccctcttgctttgacgactgccacgacgacgacgaaacaaccaaaaaataatacttacacccttagtgcggttcctcccgaccacgagctaatcgtgtgaaaccgactctggattgcccatccttcattctctggactgttgttggttagcatcgccttgcgcgcagcagattgactgtggagtaacattgcgaaacggagaaatcggtctacgtaccacaacttcaccagccaaagcaacacatttcaccgatcgcccccagattcccgcgtggtgtgtcccttgctgtctggatcttcggtccctgcacttttgcgctttgcatgggtggactttcgttctccagtcactactagtagtcttcgcgcgccttggggatcgagtacatctcacccatttgactctcttgtttaaaaaactcgtgtgtgattcatgcgcccttccttttggggctctaactctctgtctcgctccttggagctatgcctgcggttgtcggaactactatgacttcgacacccacctcgcaaaccgcgatcatggaatcctcaaccgccgcagataagaagcgcaataagctgggatatcatcgcacgtctgtcgcatgtggtcagttctgtcctttttgcccctgggttggcatcgctactccctcgtaaacctcggttgcttatcattccatagtgcattgtcggcgacgaaagatacgatgtctggtagcggcggacgacgctcagggtcgatgtgagaattgtattcgactaaaaaaggagtgtcagttcttcccagttgaccagcagccgccaatcgaaaagaaagctcgcccaggttcgaacacggcatcgaccgatccctcaaccgcctcgtcctctccgccagcagtgagcgggggagaacaaaccgaggccttttttccgtaccagccaataccgttgagttccgccccagatgtcgcggcgttcaacgctggagcgttcgctggaaattccatgacatcgtttgcaccaggtgggtggtgatcttctccttcggaggacaagaaggtttgttaacaaagttagatcgcaatgtaggggctcctgaatttgcaacagcgccgcccctcgatccctcggtaccgtgggacgaattcaccacgatctcagcagacggtcaaatattaacaaacatgtcggcggggaaaccacagatggtgaacatgccttccaatgtatggagcccgggaccgaaccccatggccaccatgccaatggcacaagggcttccgaccccgacagtcccctcacaaccgcagacgctcagtcccgcgccgacatatgctatacaaccggatggatcagtatggcaagtgcccccaacacgacctatgacctatcccccgccgccagacatggctgcggcaccgtaccccaatcctggccaattccagcaacctcccccagatatgaaccccgacatggccagcccagtgcagcctttcccgggcaaccatgttaatccgcagagccctctaccgacggaccttcaggggacgccagttgcagtaacatacgctggtacccccgcagcaatggggtttcctgcctggcaagacgtgaataatatgtcgcccatgaatgtcgttcagtatcagatgtatgctggggacgctgcacaacaagcgtcgtttggtagtccacccccaatgggccatccaggccaacgacagtctccccggtaatgaactagcacgtcggcattgatttcagcaagaaaaagaagcttccgttacataatacccagtgcgatctttttgcatctattcttcttctaccctccacctttccatcgtgggcatttcctttacagctattcattagcgggcgcaaaggattttgggcggcattttccatcttcgtttcttccgtgagaccccttttctacacttgtgtttgaggtgacatttgtacaagggcacagttagatctctgatgtcattgactttattctatcacttcggcttttttttttttttttttttttcgttacttttcttttgtttcatcgttggatatccatgtctggttttatgagctatgttgttagagcaccagcgggacaggtgtcattgataataggtctaatggcgagggtagacgtctggccaactgggcccgtgggtaacgtgatctgggttcaccatgcgttgacttccatcaccacaatttgatcaactagttgccaaacatgaccaccaagcagcgattcgcccgtttacaggccatcacccccgagaactgaattattactttctcatcttcggttgatggagaacggttggtggacgtgaaggattgctatggttttacgtctcttgcttaagcccttttttttgcatttttactaccccctcatggactgattcgacatgttcctgttgacgttgatattcttttctttccctcctatctttgtctatcatctcttctgccacatagacttttttacttttcttttctcttcaacgaaatatagatttctgctgtatgaacggatatatcacagatagacttggattgataggacgataatgaagatgagatctatagagccgacgttcatctttggtcgagtatgttacgtctccgtgtagtcttgatggccatggacccaaatacaccagaccaccctagatattcgaatcgttactccagcctactgacatattggggcctcatactttttatagtaaaaggtattagaatcctttcgtggggtatgaatgttaagacaaccgtagaactatcgtttacaccaaaagaagttgagggggtcatgagggcttggagggaatggatagctactactgctatatcttattggggtttgagaccgatacttcaacaccaacctctgaggcgatggtagatgctgacggtattgtctgaaggagaatgcaacatttaaggtgctgttggcgaagcattaggtggatgatcgataaggtgtacgtgtctgtgcgtctttcgggacagagtggtcaggataatactccagggctatcgtgacagttgcttgagttgagatgtctcggtatagagtacttgtggtgataagtagaaattacgtctgagtagatatattgtttctacagggattgatagggggtattgcgtcattcagaattgtaggtatatcttctcgctttacggagtagtaccttagaagcgtgtcagctctgtggctaatggacatatcatgggtgagaagatgttgccgggaagagaatgatgtgatttccctagctatatatgcatgtactaagttatagttgcagtgcagttgctagtgatacacaataggccacttaagataaaggtgcagctcatttcattgggtctgccaatgatgactgcctgcttatcataatgcagacttacgtgacagggagagaatgacatatctccgcgggagtgatactaagttgactggcagtagataagccgtcaagacgcactgacgttctggagaggttcaatgggcggtgttctgcgtcgatgatggctctagaagggctatcagctcgacaagctttaagacgataaagggatgggccctatccggggtcgttttgcggagagttatggagacctggagtataatagcctcagcatattatcgtagtttacataggatggggccaggggggaagagataacggttgtcgaggatccaaacattccgattcatttgatttgccttgcaggaatgttggggctgatcctctgaatgtaaccgttcttatctcgaacacctgcaggtggttatcacggttcatgcctgaaggccgacggtcggctttgttatgtttgtccccttgaattcgtacaaaaagtctgctccccgtccccattggactgacgttgtcgccattctctatcacgtcttttcaccgttcctttgggtgatgatacagtgatcgggccacaaaggccatatatataataactcctgagggatgttccactgggttatatttctcattcccttcctgatgtgtcgagagattaaagttcttccagcgcaagaggtgaattatgcgggagaaagtcgacgggcaagatgtgcgaaataagtatggctatctccatgtcctcgttgccaaaaagctatacttctttcggcccaacactcccatactacccgactgaattaaatcgaagacaaaaggcaaccacgatgaaaagtaatggatggttggaatagctgctggaatcaaatacacacccccgcctcctttctgtatcattgatcctttcttatccgcactgacttcatctcgtcgtcggctgctcgacacagccctcgctacgcgtgctcctactgcattcctgcatggagttattgccactctagtcaatcacccactgcaggggggtttcgtctatttccggagtatccgccggacccgcgagaaataggtggaaagacttgcatctctttctcgcttcgaagataatgacagatgatcgatcatagatagggtgattactatcgctattattatcattgtctggggagaatggtaatgcgattcatgataacaccagtcactacctgcacctcgatgaccattgtcaccgtcatgattgaatgcctcggacggtgcatccccacatcgtccaaccctcccaggctggggttggacgccatctccagatggggcgattgtggtatggacaatggagcttgactgcgccatcgatgtcagtctccccggaattactccaacagatttgccgacattctaacccagtctgtctattgttcctgccctttgttattatggtcggggtcaattactatgatcttcctctaccgcgtcatccagaagtcggtctacctcactaacccttgtgacaatgaccctgtgattggtgggcggtcctccgtgattattaccaatgagtatgtcactgccaggagatgtccatctgtttgccattgcgattccgactgtaagatgcaggctacttccacccttggcgacggtatacttaccgcgacaggttagctcaggcacgcgacacgccttagttgatttctactggattatcccaagaacccacccgccgggagacttcacgatgcatccgaaccaaaaagggaccaagccgaaggtctcgtgttgcgtggcgtggcgtggtgtcctctgccattgtcatcctatacgctgacattgcttctacagagagggaaaggagaagggattatcaggatttagtcccattaagtgggttgatcttgaacggcagcggctgtcttttagtggttaatctgcacgccactcgcccacttcgtcgcgttttctttgatcttggcctgcagccggcctctcacactcgaactttatcccgttagattgttggagttcagttgcttttgccacgcccccgggacaaggctgacgtcgttttcattttgaaataggtttctttattggcgggcaattcacgcgatcgacatgaggcaaaagaagaaacaaaacaaaaataaaataaaaaaccccaaatccgaaactgaaagggggaaaccaagacgttaattatccgaaccttgagtgattgatgttttggggtatccccgaggaagagccgacatgcatctcttgcactttaatatgattctaactcacctcggtccgatcgacagatacccattggctgcgatgaccaagtcaaattacacgcttatcagcttatcaccgttatctctccaggtcatcgtggttgctatgtgggcagtggaattaatatgattatcaaccactagcgcggtggacctcgcggttgtctatcccgtggggccgaaagacaacgaaatgcaaagtggaagaaaccaaggaagacacacgactggctcaacgacaattacccagggaggtgctaactgacagctggttcgaaaagctgtctctaccccgctattcagtgcacatttgccgttcacagagcatgcactatggctggtcatcccgcggctgtctcattttcttaacggctgtgatttttttttttttaattctcagacagccttgatcctcttggcacgcttgcctgtagacagattgggccctctgccgtttggaggtcaggatgtaccggggagcgggcgaagctccatttgctcgtgcgcataccttgctctctacgctattctaaatggcacccacaggtatggtagtggtgcttacattcactacgatcgggttaacccgacatctcaggacaaggcgatggagcaactactgcatgctttgcagcttgataccaaccgtgaagacttgtctggccgaaattaaccccgactaaagtacatctatcgtgactgggcaatccagacacaagacagaagcgacgatcgatcgttgctactttgaacaagatgacagacacccccgctgagagtggatccggattcatttccatcgtggatgccccttgcttaattcttcgtctagtggacattataggacagaggaggctgtagactgcgtagaccgtgagtgagagaaaagaggctataggcatcgggcctgtacttccctagcgtcagctcggttacgggcgtgaaacggggtgaccatacttaccataccgcaagcgggaaccggacggatacacagatcgggtaagataggaatggaaactcgccggtgagacgaggcatcctacacaaaattcaattgatacagcttcattggtttcccaatctgtcgttgggctctagtggcattaacgatgatttcggcaaatgtcatcgcatagactccgatcatttcatggagagcttggaaaaaagtttacattctattcatcatcttgcaacattctattgaaacccaccaatgagcaggtgtggtttttgtgaaggcaacaaaagtaccacttcaaagttcgtatgcctcgatatacatggaaacgagaacgactaaggacaaactctaaatctggcaatcagccatgtgcagagagcaccagtcttgtaattatttattccaagaagggccgaacgaaggagagaggttcctgtcttcggagctcgtccggaccagacgggttgcccgagtgctggcttttgattgagtccgccccgccggtagcgcatggacctttgccctggaggctatcagttctactctggtaggccggtgcccgatgccatcgagccggtctgacatgtctcctctctgctgattgctccggtcgagactggagtggatgtgatgaaggaatccgatgagcggagaggtcgctcaatcctccggaagcgtaccttggccctagtaatagagagagggagagagagaaagagaaagagaaagttgtatccgtaccccctgtatgtataatacgggctgttagacgtcgaccgtggacatggaccatgagcccaaggtcggcccgatggatggtctgtgtaattgtatgcatgcaagacgcattgtccacgattcaagaacccgcccccaataattctgttctgtccctcgttgacattgttcctcttctcttgattacatgacttttgtctcggtcagaagccgaaagcttcgtcctcgcatctcggccgggtgagtaaggtatggtattattcatgaagggatctcgttggttaccgttgtctatccctaaacaaaggattcaagagaacaactcggaatgctccctccgcttaaaccccttgactcactgatggtgtatgtactatgggtacgacgttcgggatgtggactaccaaccagagagtgattagagagtccgggttctcagtccatgatttttgcatctttgaaacagacgatgcggagcggtcattggcggagtttactcccaaatacggccgaacggggtactttaagtggaatctccgattttggatctaagctcatgaaggaaaagtactactaatgcgtacctgtgcctaatgttagtgctagttcgtctgttgcattttacccgtcggttaagacgaatggatccgttcaggttttaaaataactatctatgaaatattttagatttcccgacatagtggttgggatgtctcgattaacactaggtacatcaggctcaattgattttggttttaacgaaacatgatataggtcagggtcgtggaccaccctccgccagggatcaggggacggttacatgcgaaggattctgattatattcatgattatgtcaagccttttctctcgtgtgaagaggagcagagaatccgtacgggtttaatttaatttagcgccctgcagcttcgagaacatccccagcaacgttaaaaaccacgagctaaaatgggtcgccaccggaagcactcgagtcgagagatcggtcggctcagtattcgtaatacctgcgttccagacggttttggtcgttggtttcactcagggaacttaattccagcgggacccaatataatttgaatgattcatgatacatccattcgtttgaaccgatcctgcaagagttctgtctgatttggtcaacatagttttcctctgggggagactggggaagagtcaacacaatggtcagggagagaagaatgaaagctctcgcaagtggatgatcatgctacgtactgtaggaataaaattaattaatgcgaggctgcaagtatccctgcgccgattttctcttcttacggcgggaaccaaaaaatgtgacgctgtgattttctggaaaaggtaaggatgtttagtttcccaggattattactggttccgtatgtgtatgtgtatggatatcattccgtatggatacgcccgtttcctccgcccagaaccagtccgtcatccatcctccactctttcttctcttagagcctttccacctctcttcactttctttttctttcccccctccctctttgctttccctctcccagtattattcttatattatcggtttgaccgtcgcctcagtatcggccccccgtgaatcacttttcgtttctcttgtattttactttcctatctgggattgctcctcgattagcagctctacttcattcggccatgtgcgtctagagggtctagcccctctctctctttgcactgactgtcagccataccatagtatcatcccggaattaagaaaaaaaaagaaattattctacctccgatctggacaaattataaccaggagaaaatcaagcgaaagaggggcaaaggaggagacaccattaaaactgggtctggtttgattcatgacatacattcgtcgtcttgaatttcaataggtacggactgatgcattccactcgagcctttttagctgcgtgtccgtctccaatcgcacttcttttcttatttccttgtgggataaattgattatttaccgtttcgttttctctatattgcggtggtggtgcgacccatccaactattattattataattggaatttgatttggattttgattcctgtgacggatctcagaccaagtgcctaaactataactgacttggacccccttcagatcctagcttcccgattcttttccaccactgctgcatcctcttcctgcacgcagcgttcgtttagggcgggtagactggaatttattccttgcgccacggaccaatcgctccctcgacgctctcattcctgcgtcgagctctttttccctcgactctcattgcttgctgggctggttcttgaacctcttcaatcgtccttatctctttccccccatccggcctgtgattcctatctttcctttttttcttccctttcttgtttgatcccccctcctccccgtcttatcgcctactatcgtgatccccgcccttcccaataaagagtagggcgtgtgaacatgtccgggttaaccctcgggcgaggccctgggggcgtgcgaccgactcaaaccgcaacttttaccacccaccacccgtccgccgatgctgaccgctcctccaacaacctcccccctacctcctcgcagctgtccgatgacttttctttcggttcccctctgagccccgccgactcacaggcccatgacggcctacttcaggactccctcttccctgaatgggggtctggtgcgcctcgacccggcattgacagtccggatgagatgcagaggcaagatccgctagcgactcaaatatggaagctctattctaggaccaaggcccagttgcccaaccaggagcgtatggaaaacctgacctggcggatgatggcgatgagtttgaaacgtaaggagcgggaacgtgctcaacagtccatgtaggtgttctccctctgtagaggaacggctggacccgctcatcattaattttttttttgtctgtgaaggtttcctgcgagacgcggtagcgctggccccagtggtatcgctcaactgcgcatttccgacccgcccgttgccaccggtaaccctcagtcaaccgacctgaccgccgaccctatgaacctcgacgatttcatcgtgcccttcgaatctccttcggaccacccctcgcccagtgccgtcaagatttccgactccacggcgtccgcggccattcccatcaagtcccggaaagaccagctgagagattctaccccggtgccggcctcgttccaccatccggctcaggatcaacggaagaacagtgaatttggctacgtcccccgtcgcgtgcgcaagacgagtatcgacgagcgtcaatttttctcactgcaggtgccgacccgaaagcgaccggccgaatcctcgccccaggtaccccccgtttccaactcgatgttggcccacgatccggacctcgcttccggcgtgcccgattatgccttggacgccccgtcctcggcctttggcttccatcagggtaaccaccatccggtcaatcatcacaaccacacctcccccggggcaccgtttggcttggatacgttcggcctgggagatgatccaatcttgccctccgcgggcccctaccagtcgcaattcaccttctcacccagcgagtctccgatggcctccggtcatccgtttgcgaacctctattcgcataccccggtggcttcgtccctcaactcgacggatttcttctctccaccgccatcaggctaccagtccacggcatccacgccgcagcccacctacgacggggaccattccgtttatttcgatatgccgtcgggcgacgcgcgcacccagcgccgcattccgaactatatttcgcatcggtccaacttgtctgcttcgctgcagcctcggtatatgttcaaccagaacaaccatgaacaggccagttcgtcgacggtgcattcgccgagctaccccattccccagccgcaacatgtggaccccactcaggtgttgaacgccaccaattactcgaccggcaactcccaccataccggcgccatgttttcatttggagccgattcagataacgaggatgacgatggtcatcagctgtccgagcgggctggtctggcgatgccgactgaatatggggacgaggacgggttctcgtcgggcatgcagtgggatgggcagttcccgggctccttccattcgctgccgggctttggccctcaacatcgcaagcatgttaccatcgggtccacggacatgatggacacccccgaggagtggaatcacggtggcagtttgggtcggactcatgggtcggtggcttcggtcagtgaggtgcgcaaccgagagcaggaccctcgccggcagaagattgcccgcaccacgtccacccccaatacggcccagctgttgcgccaaagcatgcactctaataacaatacgtctcatacctcccctaatacgccgcccgagtccgccctgagcagcgcagttccgtcccgcccggccagtcccgggggcagcaagaacggcgaccaaggcagcaacggaccgaccacctgcacgaactgcttcactcaaaccactccgctgtggcgtcggaacccagagggccagccactgtgcaatgcctgcgggttgtttttgaaattgcacggtgtcgtgcgccctctgtccctgaaaacggacgttatcaaaaagcgcaaccgtagcagtgccaacagcttggcggttgggacctcccgtgcgtcgaagaagacagcccgcaagaactcggtgcagcaagcatccgtcacgactccgacatcaagccgcgctcagaatgggacttccttcgaatccccgcccgccggctttagtgctgccgcgggacggtcgaatggggtggtacccattgccgccgctcctccgaaggcagctccctccgcagccgcctcccctagcacgggccagacccgcaacccgatccaggctgccccgaaacgtcaacgacggctggaaaaggccacggagatggaaacggacgaggctaacaagtccgcgggaggccgatccaaggtggtgcctctggcacccgccatgccaccggcagcagccaatccggcgaaccatagtattgccggaggccaaggggctagtcaggaatgggagtggttgacgatgagtctgtaatggccgcgcttacctctctacttctctacactcgtttcttaatatctttcttgaacccccccttatattttcccaccgttgatgctacgccatgaccgatagagatgatgaatactgcaaccaatggaatctcgctagacgagaggtgttagatgacgtggcccgcgatgcacttaatgagatacgaggaggtgcaatgcgttggttacgctagtttaatggtaacatgacgagggatattcgctctgttatttcgggctttgatctgtttcagtctgcgatttaacagcgactgatcctctgctgtgacaatacacagcttgtcttgtggttctgttgtggctttctgtttgtttggctgatttgatttatgcttgatacaatcgcgtctgtccggaccccggcctttgttttgttttcagttctgattcttcactgtttctgattctcttgttcatgtttttgatttgttcaaggcttggggccgggcagaagtgcgcatctctgctttgtgttttccgtcaccgtgcatagacgctgtatgtatatgctacagcaagattctacttatccagtctgagcctgtattcattgaagtgtagccagctgtcgaatgagctttttaacgatattgttttgttgagtagtcaacaagtagtatctgtatattccggagtctaagtaagacacttgagaataatgtggagcttctcgccctgtcatatatctgaacgctagcccgtaggccgtgaacaagggtgataaggatatactagcctaatgaattgacgtcatagcatataagcttaaatagccatgttccacaattgctaacacgaacaacccaccccacccgcaaattatatatttagagtagggtggatactcgatagatacatactaggtaacttgaatatactcgtcgaaaaactacaaataatcctccctgcctcaccttttgccccttgatctcctgatacctttaaacatcgtgcattgtgttcattttaacgatcagggaatcttcaagagtatatctcccttttgagattaaccggcaatgtgctggagattgaacacaattgtgtatggtaggagagctacgaagactattgtataagccagtttctcaaagctgaatgtgttagccgtccttcagagagagtggcttacaggttgtatcctatagtcacacgagtcatgacaaagagcgtctgagagcttctgatccgcgtgtagaacaacacctcactagcttcccaggacaaagttgacaatgtggagtgtgattttaaagattgtgacaggcctgctgtgcgtccagaaggagggtgtatcatctgtgaccgccatctctgtgttaagcatattgatcacgaatgtcctacgtggcaggtaagcaaaatcacccactttcaggccagagatggctttgctcacaatagaggtaaggatggggaatcatacgatcctgccgctcaagaagcagaaagaaaggagttcacaagactactgaaatctctcgacctgtctgcacttctctctcgagcaagctatttgcgcaatggtattacttgcttgtcgctgtaacctcttctgtacgacagatcaacacggtcgtctgtaatgggcggcatgaattatcatatagaaatccttttcgatgatggatttcggtggttagcacgtatccggagattcaacgcgacctcaccaccgcctgaactgcgggattatatcatgcgaagcgaagttgcaactcttcagtttctaaggcagacaaaagtcactgcccctaaggtgttcgattacggtccccatgggcagactcttgttggagtcggatacatccttatggaaaagctcccgggaaagtcactgcgctggtctcttgcctctccagagcaaaggggggaagttatggaccagctcgcggatatatatattgaattgatatcatttccctttgataatatggggtctttggaccgaccggggactaatcacattgggcctttcgcacgagaatcactgacgcactatgatgactcgcagatgattcttctcggaccttgcagtaatcctagggacaatctccgtgctagcattgaactcaacctggagttgattaggaaaggggaaagctgcgcaggacgtgagatagatgcatacctagtccatcgctttctattagattgcatttctgaagttttgctataccataggtttgacgacggacaattctacttgagacatgcagacgacaaaggtgaccacatccttatcgatgatgactataatatcacgggtattatcgactgggaatgggcttacgccgcacccatatcggaagcctttaaatcccctattatgcttcttcccgttgctgattcttacaatggagtcaactgcattggcgaggatgaattaacatttgcaagcatactggaggagaaaggcaacaaaggtcttgcagcaatagtgagaaacgggcgcctgcttcatcggttctagttctgttgcggatatgacttcgctgactgggaggggtttctaggcctttttcaaggcctagaaatgccttaaagaaagatgcagagttggactgggtagatcggaaacagaaggctcttgagagatattcgggcgatgaacagttggagacgctgctggctcggacagattgaaaactgcggctcttggccatatggctgcaccgtgctctgtgtttcatagaagtcattcgcaacttgaagctaagcagtgttttgcacgcattgtaagcagatgtaccccgtaatattgggacctgtgaattacttagtgtgttgccacttgggggctggcgccctagtacaccgtcatgtcacctcttcttcacatcgtctgatcatcttcgtaggttgtgtggatgctgagtgcgaagtaagagaagcgtggaagatgtcttgtgtctgaagtaaacataatcagatcgaaaatccaataacctcgatgtttactcccgaatgctgagcagtacgaatatgtgggtcgaactaaatggactaggactagggaaatgcagctagctatactagcgtcacttgtggataattgtcaatcctgctgaagcgacatcttttccgtgactacttgttgcgacttcacagcacaaaccctcgccagacttaccaggatgctctctacagacctgaaggaagctcttcgctacgagagccccgcgcacatgcctgggttcccaccctctattagcccgattcattttggttgcatcggaggacacggccagtcggcgatcgctttgatcctgttgaaattgggatatgttgttcaaggaagcgatatcaaagaaagcgacaatgtcgtccgattgcgggccgcaggcgcaacagtatttattggccatgacaaagaccagctcggctctgcaaagctcgtggtcgcatcaaccgcggcaacgaagaacaaaaccaatgttgaggttgacgctgctcgagaccgacggatcccggtcatccacagatccgaaatgttggcctcgttgatgcgccatcacaagtccattgcaattagcggcagtcatggcaagagtacgacgactagcatggttgcgggcatgctagaagccggcgggctgtccccgacaacgatatccggtgcggtcgtcacgcagtatggcagcaatgctcacatgggctccggtcactggatggttgtggaagccgatgaaagcgatggcacaatggtccggcttcctgctctgatttcggtggtaacgaatattgacagtgaccatataacattttatggcacacaggagaagacccgagcaacatttgctcagttcgtacggaatgtgccattctatggactcgcggtcctttgcatcgacgatccgggagttcgcaaaatcctccccgaggttcaagatcgcaacatcgtcacctacggggtttcagaagatgcagatgtccgtgcagagaacgtcgaatacaacccgcaagactcgaccttcgtcctgtccgttagagaccgacgggatggaactcgtcgagttgttggatctatagtcttgaatgttctgggattacataacgtccaaaacgcgttagccactactgccattgcacttgagctcagcattgaactggaaagcatccgttatgctttgggaagcttccagggaacaaatcgccgttacatccacgtaggggaagcaaacggcatccaaatcatcgacgatttcggcacacaccctgccgagataaaggcgacacaaacgatggcaaagcaagcgggtgcgcgcagagtcattgctgtctaccagcctactgttgtagtgagaaacgtggaagcatggctggaggaatatccggcggctttcgaagagtcggcacacatcatcatcggccaggcagacggggttgaggttgatccagtcccaacgggcgaggcacgggagacacttgttcaatacctgcactcccacgggcgtgaggatgcgatctcaatgcccgacccatctgctctcccagagctcgtgtctcgcttggggcaggaaggtgatttcgtggtgtgcatgggcttccgtagctcaactctctgggcacgagcattggcaggtcaattgaaagcgctgggaaccccgaggatgaaaggcggccaataaaggaagtgacttcagaggttgccactttcggcgtcaatttcacaggtccctatattctagttgtaatatgtagtccatatgaataaatacaagcttctcttataaacgacgggttgttatatatgccgaggccttgtactcatactccgatagggcttatcgtatgaactaaatcgggtacgtacatacctgaggcataaacctgacaaagccaacatgatcacgtgctgatatcaaaaataattgaagatagcaaatatctccagcttcaattatatcctgcgctcaattgagactctatatcaggacagctggtcctctactgcgcgttgttatactacaaacagagatatatacgcataaattcaattaattgggttagcgactgtacctgccacaacaactctatccaccatgggatccagcgcgaagaaaaagaaggaaaagcagaaagacttcacagtaagccatctgacaatataaacagacataagctaacagaacacagaaagccaaacttaaagtcggcaaagccaaaggcaagcccgagaacttcaccgataccagcttcaaatcgaaaggttcgccttatctccactacccagaaagaaaagaatcactagctaactaatcctctaggaatcgtcctaaaccaacaatccctaaccttaaatgctccaacctcgaacacacaattcacacaccacgtctccctcctcagctccaaatccgactcccaacgccgcgactccctcgcccacctaacaacctccatcagctcgcgacctgtcaactctcccctcccgcaaccagtcagcgtcattctacccaccctcctccctctaatcctcgacgcaaacacgggcgtccgcacccaactcctcaaactcttccgcgccctcccacaatccgacatccgagaccatgtcccccagctcctcccctacatccgcgccggcatgacccatctcgcagccgacatccgcgtctcagccgtggaagtcctctcctggctcatcgatgtagccggcacagaagtggtctccagcgccggcggctggatcaagacactcaattgcttcctctccgtcctgggctggcacacagaggaatcggccaagtggtctgcaaaccgcgcctcgttcggaaaatcaggcgccaagggccagccaatgatgaaggtgttgactgttctagccgagttcttgaacgcgggcattggcgcgccggccaatgaagcgcaggatgtggatatgctgggatctgggggtgtggcagggtgggagtttcccctctgtcagacggctgtgcatatggtccctgatacggcggcgccgtatgcttatttgaatctgtttggacagccacgggacgaggagggcgagatgtatgagacttgggaggatcggtaccgggtcttttcgaatcggttcttgcgggctattcagcggggactggagaacgcgaggcaggagggaggtgagatggggagggctagttcgggggcgagtaaggtgttgaaggaggctgttgcttatgggacggggattgcggtgtgattggtttatctacgatatgctacgttacatggtactgtgatgacggccatgtggaagacctgcgatgtgccatttgtcatgtcgaagtgggatccagggcattctggcagctgtggttgctgttccacgaagtgcacgagagcagagtgttccagtccacacagccagcgccttggctgatagcgaaatcgctcaaacaggaccgcgatattgtatcctcccacgacagcacctcacgaggaacaagtattcatgatttggaaccaaaagaatagatcgagcaacatgtatacaaaataacgaatatacccaagaatggaataaatacatctcgaaagaaaccaaacctaagcctcaaccttctctctcatcaccttctcctgactatccaaacttccatccccgtcctccctctccctagcatcataaacctcctccggcataaccgccacgtccaccagggactccctagccggaaacaccaacgaaacaacaacatacacaagactcgtcgccacaaaccccaaaagccatccaaactgatatggatgcacaccgacacccacgtcaatctcactattaacggaattaatcaacccgggcaagttcggcgcaacacccaccacaaaagcaaccacagccctccaattcaccccccaacccccatacccataagtcctattctcccgctgatacaacgccaaagtatcatatttcctctccttaagcacccaaaaatcaaacaacataatccccgcaataggccccaggaagatagcataagcagacatgaaattgagaaaattccccgccgagaccagtatcttccacggaaccaagccccaagacaatagcccgcagatgatctgcccgcgccggagattgatataccccggtgcgagggccgtcaggtcgttagccgcggagagggagttggcggagatgttcacgcccagggcggcgagggcgaagctgaaggcggcgaagaatcggcaggcgcgactgctccagttgctgattaggtcgatggggtcccaggggatggagccgccgtagcgggcttggccggcgctggaggccacgatgccgatgaaggagaggaaggtgaagattatggggagcatggggatgtagaggagttgccattttgcggtgacgcgggagtagcgcgagaagtcggactagatatcttggtgttaggtttggtatttcttgtctattgggatgagtgtgatatgtacctggttgacgctgagtgttgcatagttccctagtacactggtcatattggcgagaaacagccagctgtatttcgaccccgacaccgtcgctttctggtggagtaatcctccaccactttcggcgacaaacgcccatataaagatcgcgatccaggcaatcggcaccagcacggatttcaccataaacaaccaccggagtttattcggatgaatacacaggaacgggaactgcaccagccagaagatcaagtacgacaccatcccattcgtagtaataccctgatcctcagggatatcgttctccaacgtaaggaaactaggccaaatagccccgatcatagcccgcacagcattagcaccgttaacattctgaatggcaaaccagaacagcgccaggatgacccgcgacacgatggcgatgtacgagccccagaagccccagctggcgcgggcgatgacagggaacgggacgtggtagatggcgcccacggcgccatttccggcgatgacgaatgagatgatgaagaaggagatggcgacgatgatgacggcgtcgctccagccgaggcctacggccatcatgctactggcgaattgccaggtggcggcgttgaaggcgtcggagatccagtatgctggtggaatgttagccctggtactatctgggagggttctgagacatgccaatgaagctaatgggcccccattgtcggaggtggcgggggacagggtctaggtctaggtttgtccatcgtgcatttccctctgcgaaggctgatcgggattgctggacgtggagatgaggtcggagcttcatgtcgtcgagaaatgtctttcaattcgtagaagggtgtgtgttcagagaattgtagtgttggaattccacaccaagcttgaggatcaccctgaagatgcacgatgcaagggggtggggtcaattagggctcgatgcaaccccagctgtaagcagtaacgatatgccaatagtcctctggataaatgcaaatggatgtaggggtgtcaagcataccccggagactccgagagggtagcatgagcttgagataaatgacagggaaggaaatccggggggattagtatgcatgaggctatgggacgtgccccgataaggaaatgaggaggtcatcaagactgataagtctgcagcatcatcccggcccccttcgtgcccgtcattggccgctatggccacgaggcaaaagtctgataagcatctgttgataaccctaattttggactttgacttcgttgatagctagattatactattttcttggcataatcacgagcgttgacagtctattcatccggaaatggctcgatttccggcatattgaattagctgcatttggactagatcggctgatttccctatggcacctagcgaagatctattttcatgaaggaggacttcaattccttccaaggagcagagtagtatcagcgagtgaaagtattcaccaaatactggtgaatactgcccttctagaagggtacataagcagtccacttacctgtatatactcatctcctttccagactcaaacatacttcgactcgaacggaaatgtcaaagtgacccgttcattgagaggtttctatggattctatatattaattgagtacaacttttgataaaggattcggcctcgaaatctgtaccacagaatctttgaacaccgcgtcttaatgtataaaaagactgtttggcaatgctacaacattcgatgtagacaaggctgcgttaaaggctgcaacagagcatctaaatcatggttgtgcgaaaaggcctgaggaaaattctactcgcatcttgtatgccgctacccattttcgagtctctaacatttgtgtcaatcacgccagattcgacttctagagatggtgttcaagaacactggaactagctgaacagaatgagcagcaggacactcaaacaagatatgattcggtaataaagctggccataggcccgcttggcaaaataatggaatcgttattgattctagcataatgcatgcgctgctcttcactgaacacacaatgtccacatagtcgggaaaactacatggaagatgaacggagctgcacggagcaactattctctttgtaagtctaccgaggacttgacaattggagacacggacaaagaacagtcgaggactcagatggtatatcagctgcgacttcgtcaattaagctccgagcatccgatgagcaaagaatgcgaaagctatacaaggacatctggcagcgaatttatccaaggtcaagaggtagaaccagttccctaaccaggtgcagatatcgccttcttgacgtctctacacgcatataacctcaggggcgaacaaccaaagggctccaagattttgcgtcggacttgaaaaggccttggataccgtgaccccgactagtcaggcagactactatgatgcgtctgtactctcttgcctcatcatccactaacctatcattcatcaccatgtctcactcgaagatgactgataaagtgaggctgttctggttagtaatgacagcaaggcgacacggtacggtcaacctgtgaatggaaactactatatccctcctagtctacgggctgtcttctgcgatgagattgcagataacatgaccaagatccacgaggaaaggttcaccatctggattcgcagcctcccggcgaacgtgacaatttccctgttaggaacttctcgacggagtcaatgtgttttattctgtcgtctgcttattctgtgtactacatataccgaaatgagagggtatgagataattaccgaaacgacctcagaaaccctaggactggcaacccagcagaagcaaggaaggcaaggtatactaaccactataagttggaaaatggtagagacgtcaaggacctactatatactagacgggacctttgccgtatcatttagcttttccttaaccaatagcagtctatctatgcgcgtcgaaagcaaccgatcaatgagccagatatacattcaacgagtggaccatgagagaatcgcgcgatatgagcaacgtaacagttgaataagatgatatcgggctggtctttggataggggcgatctagtccaaagcatcctacaacagaataggaatgcagcgacggattttacgaaggtaataaaccggcacaagaaagaatcagtacagatgagaccccttcctgaggaaacaaaagaaaaggagctggacctattagtgactccacttggccaacatcccgttatacaagccgcttagttatgccttcctaaaggatcatcatcaagatactgcttagactcatgaccatgaacattctagcctgcggcaatagaattacatatgtttcctctatgaagggagcgggctctttcttctatggatttatgttagctatggtactccagtgggcagaaaggacctcgatgataggcgaggagtcaggatgatcagataccactggtctatgttatcactcgtgagaaagtaccagacatgtatcgtatattatctctccgtcgattcacgatgtctcactctatggataaccgatggccagaacttttcgccgacccatgtcccagaagaaagctctcacggaaagactcatatcttcgtccagcaactcttccactaggacgaactgcacaataaagccaatggctgagtcgctgacccccctttgaatagatacagctctatggattgggaggtctggaggagagattaaagcagtgattctgatctcgataaaaatgaatccagctccaatcacaagccagaggaaacacacggttttgtcctgtcatggaacaaactattaaggtctctcgcgagggtagccgggctttaacgactgttggtgatgctttagatatccgcctggaacaaattttactccacgacagaaatccatcgatagagccagactatgagctcggcgagggcattatgacccggctagagtgtctctcctactggataaagaatcggttatttggcctgtcgagtgatgtgagagacaatattgtgacgaccccatggagccagcaggcgctaacatgatatcaatgggccaggctaagtggataggcaacacggcgaatacttggaaaacaatgattgatctataccattaacgaggcgcgcgtacgctactgacgttaccccagactggtacccctgcggcaggtaacatccaagggtacatcaaatttgataaaagactaccagagacgcttcatgacaagcagataacatttctagacatcgccgaagtcatactaaagacctacattgagaacgccacaccacaccctaccatttatggatgcctccctgaaaatacctgattgtctgatacatggacggtcatggcgataatctttactacggtaaaagaacaggtatgtaaatggtcagcagactttgaggacaaaggcattgtgacaaaaccacgagtgcctattgtcagtactcatccaattggataacaaacggtggaatgcggtataagggatattacgtgttcagtggcgacaagcaattgaaagtcccaccttggttgtgtaatatgtttcccagaagtggatatgaataaggtcgaggaaagggtgcttgaatataccgatccaagactgctgactcgcatacttgatcatgtgtctggtcttcctagttgccataccaaacttgatactccagcttcgctgggaagaagaaccagactggatcctgtcccttttcttaaactatgaggatgttaagaaaatggtggcaaaaagaagagaagaaagataaatagaaagagaaagaagaagaagaagtgatggaagaggcaatcgaccccgaattcgagattaccgagtaaaagtcttcattaataggtaagaaagacaaggatgtcttgcaaaaatcttactcagaatgcttgctaactggtatatattagtttgcaggacttcctctcacagaaaatcgacctctaaatcggagactttcgggcgaccacggctgattatgatatcacctcaactggaggcgtcaattcggctatccgaggagatagctacacacaaaaactatagacttgccagctgtgaggctttgccttgggaggctggcatccatcctattaaggatcctcgtctcttgcgcggagcgctagtcattgcatcctacggtggtcagaagtggtagtcaattataaggctactattcttttatcggagaacagttgaaaaaaccgcatctatactgagtatacacgcgcgatgaccaaaacccgatgaattgcaggctactcacagtggggtttaacagtttaggccatccgatcaggaacgctttgagaaaggaaatggttggcaacgtctttcccataaagaagactgcatctatgcttgattaatcatcacccaggagagtccctgcaaggttggagtcttgaaataggcagtcttgagtatcccaccgaatcttgtcttgcgtgcatgtgtgtacctctattcgtgatttcaatatcttcatcacgggaagaacgttcgcgtgctgtatttcctttttaggatgcgctgtcgccagtaacaaggtgggcctttatgcacacagtaaacgcgcgcgaactgtgacacgaagatactctgaagccaagccagtcttattcaaaagggccggctatactgagctaataagagacaggacaacagacatatcggggcatatacgtctgacattgcacaggacctcaaggatatgttgaaattaacctacagataatgtaaggtaaccactgatgagagttctatactgacataatggttgcaaacaataccatccttggtacattcatcgctctctcccaaactcaagtacgaaaggatagtcaacatggcgtctcttcgaatacatgtagagagtgacatatacgcagtgctaacacattatctcctcatttatcacgaatagccgttacacgttactattaacatcgaatatactcaagatgccatcaatgcccatgttgcatcgaggtcacattataaacgcctgttcaggctcaacacacctccgccatcggagactaagaagagatcgtcatatagcttatatccctctcgaaagtcttgagtagtttaagtccaattaccgcagtgccaatctaggagctacaacaggccaacctgtttgaggacccggcggttcaaggtgaatgccccagcgcctgtaggtcattttgagcagatacggaaattgggtaaaagagccggacggctcgtggatgtctgtactcaccagagaactgggcgtggtccatggatgtctgaatacctcagacacagcagtcttatgataccgacttttcccatgttatgagcagagtttttcatcggtagcttttacaaaggaagccctacggcctaagcctaagcctatcgatttacataccttctgatgtccctgaacaaaccctgccactggcagtaacttggcgtccggtttcagataaggctccgaagatatttatctacaaattgtcacatggaaattagaaaggcatctacagtaggcagacacgtcactgcctctagatcactcccagcaggctgccttacggaactttcttaaaatcgatttacctgctatgattgcaaagggctgcacaggcggcactgggtcactagggctactgggcagagacgtaagaatagcagagaatatccagtcatacctatggggtatcccggcctatgcgtttctctgcgaactccggatgcgatcctccaactgggaggggctgatcatggagtctgctcctaaactgcttatagaagttgaagaatggtacttcttgcagcccgaaagcaaacacttagggttcatagggaagccgctgattaagggccatcaccagagcaattgagggtcatcgtattccaatatatagatccaatagggataattctatcaacttagaggttatcaatagtggagtcgaatgcatcagacagaggctatgccagtgactacccgtccaatttgactcgtgctgaagcagttcgcttgtattccgacgcggcactggcatctagtcattgagaatagaggaataggaacctcgttttacaagtccattatacactttctagaattcttgtagtttagagaagcaatagacaagctaagcctatcatatcaccgtccatactttaggtatctaagctacaagctaggtcatttgccttttggtctcctggctgagtgacaagatggtgatatatatgaataagaaggtatatcatatttcactatgaataatcaccacagccaaagaccaaatcataatatatacaaatttaacccatcacaacatcagtttcaagaggaaagctccaccaatcattccaccaagcactttcctcttccatcccaaccggcctcggccacacacttctaaaaacatccttgaagggctccacaaactccggaaacttcgacttgaaataaatctcgtcataaggacacgaagcaacctgtgtagcaaacacttcatcacgacgatcatcccgtgaattccgctcgactagccacgcgcaagggaaaatatggaccaagtgacttaacaaggtacccgtttcaaatgcgctacattgaagtcgaataatcattctttccaattttgatgagcctatgaccttgtttccggatatggctttgaagatcgaacatgcgaggttcggatctatggcgctgtttctaaataatcgttggacgtgtccgttgcggcttcggtagaagccccctaagtccttgatggagaaattattgccgaactcatcgaatgatggttcactaggtggtttagtgtttatattccgaactagattgaaatcgtgacggaactcttgattcatatcagtttccaagttatcttgacttctaccgagtgatgcatcggatacgtctaggtgtaagtgtagatatctgagccgtggtatggttcctatagctttatatagggcaatttcggtggcgtcgccctgggaacgtgggatcacgagatccaggctttccagaagcggacaatgtttcccgagctggaggatgtcacgttcagttaaacattgccaggcctggggacctgcgaggtctagcttgcgcaagcaacagccatggtgatgaacaagcggatccaaagagaccattgaatgccagccctccaagtatagctccctcagtgctgggagactctttaagaattgagttgcggcctcgtagagctcggtggtaggagcgtcctcttcgagaaaagcaggggctttgagctgtaagtataagactcttagttttgggaactccagctggtgggaccaggcaattagcgccttcggctcggccaatgaacacagttcaagggtctctagctcagagaagttggtgtgctttccccattcgatgagtgtcatagctgccagagggaccaggtcaatgactcgcaagagttttagcgatgcaggggccagaaagatatcttgctcttctgtcttgggcttttgcaaaacactaggtatagggacagttgtgaagttcttgggagcctcgcgacgggtgatttgcacttccttcagattcggggctgactttaccagacgttgtaaagtcttcattcggtagcaggggctgttgtcatagctatacacacctttttcattgtactgcagcatgatgctatgcaagtgtgacgaggacaccaacttgtgctcttcggagtcttctatgggtgtttccaaaccctgcaagttgaatgtctggaggtgtagcctcgatgtgggtgcccagcgatgcatggcatcaagaatacagacaggaaactgcccgccgcatctgaagaacagatctgtcagcgcaggcagatgtctaattaactctgccacgggcttccacacatggtgtcgtttgttacccattttgacgtccccatcgcgagtgtccgggcacaatggtgtctcctccaaagttgcagcacacgtaggctcatatggctcatccagatccgtgcgtctcagctcagtaagcccaggcggatgccaaccagaaagcgccttacaaggagcttccgccttacaagtggaatcgctttcttcaattatgagccggcgagtaaagtggaaaccccttgtccggttaagctctgccacaatcttctcggttggttttgtcaaggcatagtgtccgcataccttgatcacgatatcgcggcaggttatagacctggctgctctactagcgtggttgtagaataatctgctaactaatttgagattgtggagactcgtgggttcgtcattgactaaaagggtaaagatgagtctgataagctcagagggcaagcgcctaaatggtggaagatcctccagatccatcttgctggttttgtgtaagcattttgtgtgacaattagagaccagtctacgtatataactaggacagttttgtcaaattccccttggagagggaaaggtcctgattgagacgcgtatctccggtccggcaagatgagatgaaaggttctacaaacggcatttaataacactcaaagaatttgctttcaacttcggaacaaaggcaagggtgatgcggacttcctaatataggagtgttcaacacaaagacatagtcttgcggtgcgaatatccagtatgacattgaatgggattgttcttgcatcttattgagacattgttagacagttgtctgcaaattggcaagttttggtacattccgatagatccagcaagaacctcccatcaatgtactattcatcttattttgcgagatagtcttgctcaggaacctttgtgcgcattatcgcaattactcctacatatcatatcagcatactgaaactaatgttgcccggaaacaggtgcggaggcatttctcgagagtgattgatctgaagcctaccccaaacgatagattgtccaaaacaatagacagacaaagagttacacggaacaaagaatgccagtcactttggatatccatgacaaatctcctctattcttcgaagtcaatcccttcttaagaatctcagatattacgtgttctgacgagtaattatggtcctttggttagggctttgcaccgcctaagccctagattaggtgctttacaccactagtatcccggagttggatccgtaatacaggtagtatactaacttttttatactataatatgtgcaaagcttgcaagttcagtctccacctgttctggcattgaatcttgccccccgcgcatgaccatctatagcaacctccgacatccccaaagtatccgcgataccaaaagtcgcatgaaccccattcgtcgcttcacgcaactcaacctccgtgcccttctccctcatattatgcgcaaatagcacaatattatcataaagcacctcggacgtgccaacttcaatgaaaagcggaacactcaatcggtactcgcttcccaatggcgacaaatagggattactgtccgaccagccaggggggatatagctactagcaccccaagaaccgaaatcatattcgatgtaatcggacttgtaattgcggtgttgatccatctccaagagagcctttatggtcatatcaacccacggtgaccataacagcgcgcagcgaggtagaggtattgcttggttctcggtggtgatataccttagcattgctagaatgagattcccgcctgcggactcgcccgagagcacgatttgggatggggggatctggagggtttctatagtgtatatataggcggtgattccatcctggacggcggctgggaaagttttgtctgcgtctaaggggagtctatattgaattgagaggattggccatccggatagcttactgaatttcgtgggtccccagccacatccatcgccgggtcaagggccgaagagtacataggcgcttgggtggaaatggatgatgagctttcgtgggggctgggctggggctgttgggtaccagcccgcgccaactggtgtggctggactgctgggacgggggtaagctttcctttatagaccgcggattctgttttcaggttgggatggagcacaataaatcgatctccatctgggcctggctccaatgctttgggagtgcggtacctgatcgccgttcgatatcgaatcaataagatcacaacttgtaaggtggcggctctcttccatgaccatgcaggattgggacggttggacttgggtatataatacagccaccaggtcaccaaacgtgccggttgagtgagcaaagtatatgctgtgtacagagtagaatggaccgatggcatgatcactcagaataaagggaccaggagatgcaaatagtaatagttttgggagatcggcggctacatacttgcgtatataagataatagcttctatctactagaatgatggagccttgggagtctctactccgcacttgcgttcatttagtcgcccctggtactaagtggattaaggaatgatcgagttatttcggtgtgcctatacgcaaatacacctagacaataattacagacaaagaaaactagcattggaaaaaaggcccccaacatgaaggcacccgatacaacctcgtgcagctacttaggtagtattggcgagtcatgcctaaagtggggaccctaaggcgatgcgggagatgcctgtcagattagttctcaagaacgcctgctgcttagcctatgcggctgcgccgtctcttacacagccccatttccacctgagagcagacgctggaggattttacactatcgccgctatgggatgttaagttcttggtcttgctgtccgatggctctcgggatatccttggaggttgatcgaagtgaaaagtaccagtctttagaccagggataaggtgactggggtttgagaaaagtgggctatatataggcagataggtacaaacaatcacggaaacctgctcaattgcagtccagtccatgatgccggtagacttcctgtccactgcctcgatcaatacttaataaaccgggttgtattccgtaggtaggaaaagagtgtcagacaagcagctattgaaatagcgataaatctaggcgctaagatttatacaagtgtccgtacttcagagaagagagatcttattgtgttgaaccttgccatcccagagcgagtgtatataggagatagagttgagctatctcataactgaagacacttaaagcagccgtggatgtagtcctcaatagcgtcttaggggagaatccccggcaattactggcctgcctaaagccattaggcgacttatcgatatctctgttaataaccactagacattgcaaggtcttcgaattaccattttcgctcgtagaaccgcttatcttaaattgctagaacatccccctgtgacacgagagaattctgtctggtatccgagacatggtgagcaagaatgagatcttaacttcaacccccgctcatattcttccagcaagccaggtagaagatgtctttgtgaccctccagaggccgaagcttctgcgaagactttgatagaggtgactctccagaagaagctagctagacattgcgtatgcccgaagaagactgagatgcaaaagcctattcacgcatacagggtagattctctcgtggcagtggacttgcgatattggcgtcaaaggacattaaatcatgcttggtatctttgagactatggcggaaattagcaccggtgagttgagttgttatttgtggcgggttcaagatggtcattgaattattgcttgatattcctagtaatcaccacctatgacattgatttcaacagcaagaaagtaacgacattccatattttacacattaaaatagtcaatcccaatagaaacatactttaatccccattgagcaagcttctatttaattgactactcccacaccatcaaaccaaaactatctatcacgcaatctgccttacaatgatgaaatcctatctaacaatatatctccgcaccactccccaaccaacatgtccatccaaccctctgcacccaccatacctcctatctcaacaaataacatgtaaataaaagaatagaatatcacgcatcaagcggacccaatgacgaatcgcacccctgcataatcaaagacttctaccgacagcatcggctacttattaccggttacgcgatgacgcttgctgatggcgagagtgcggggttaatgaaattttcattttcattcttctcttaagtagatatatagatgggtatttatgtagatagatgaatggataatatacatatatctaaggtgtcaaattccaatatcacctaacttacacacaagagatactcaaaatgggcgacatcagcacccaaccagaccccagcgatgccaatggcacacccaagaaacatattctcttgaatgcattcgacatgtctactgtaggacatttatccccgggacaatggaaggtacgtatcttgcattattcctctattctcatccaattccacggccagatggttttatagaagatactgaagaaagaagaatcccgccgacaaatccgccacaaaacgctccctcacctactggatcgaactggccaagttactcgagcgcggcggcatcaacgccctcttcctcgccgatacctatggcggatacgatacctacgaaggcagcttagacgaatgtattcggcgcgcggcgcagtggccggttacggatcctactattgtatgtccttccttttctctctatcttatctgtctggtattatgggtttatgggtaggttggggtagatagtacagatgctgactgttatggtaacagcctatctcggccatggcagccgtgacgaagaatctggccttcgggatcacggcgtcgacgtcgtttgagccgcctttcttactggcgaagcggttctcgacgctggatcatttgacgaatgggcgtattgggtggaatatcgtcacgtcgtggaagaaggcggcatttaaggcgattggattggatacgccgattgagcatgatgagcggtatcggcaggcggatgaatatctgagggttgtctataagtaggtttttcttccggtcttgtttgggtttagtatgaggttataagggatcggaggaggagaagaaagaaaaaaaaaagaaagctaagaagccagactctgggaaggatcctgggcctccgatgctctatcccccgatcccgaaacagatacctacgttgacccggccaaggtccgtcagatcaaccacaagggaaagtatttctccctgaacacacgccacatcgtcgatccgtcgccgcaacgcacgccttttctcttccaggccgggacatcggcagcggggtcagcgttcgcggcgacgcatgccgaggcgatcttcgtgtcgagtcattcgccggcggtgctgcggccgaagatcgagaatatacggaagctggcggcggagcaagggcgggatccgcggtcgattaagttcttcgcgacatttacgccgatcatcgggcgcacggatgacgaggcgcaggcgaagtatgaggagctgcagaagtatgcatccgtggtgggcggattggtgctgtttagtgggtggacggggatcgatatttcacggattccgctggatcaggatatcacggcggcggactcgttggaggcgcataaggtgaccagtatgctggacgcctttaccacgaccagtgaggatgttccccagtggacgccgcgggtggtggctcagaaggcggcgattgggggcttgggaccggtaggtattgggagtccgcagcgggtggcggacgagatggagcggtggattcgggaggcagatctggacggattcaatctggggtatgtgaccacgccggggacgtttgaggaggtggtggacttgttgatcccagagctgcggcggcggggattgtatcctgcatcggcggaggctgacgggctgacggcgcgcgagaaagtgtatggcaaaggccagcgagagttgcgcgccgatcatccggggagtcagtacaagtacgaggtttatcaagaagaggcagctgttgctgaaacggaggtgtcatgatgcgcagatatggcgatagagttgctgtcagtctgtccgattacgggaaaataataataagtttactgatttctgtcgcaagattaagcctgacagccacaacgccttctccgtcaccactgccgagggccttcctaaccctaattgtcagccatggcacaatctagatgaccttctttcttctttcaaatccctttgctttccctacggcatttgatgaaccttctcgatcgtcgtgcctcctaaaccagtaaaatagagaaaaatgaaaatgaaaatgaaaatgaaaatgaaaaagaaaatgaaaaatgaatcgatgaccctacgagatactcccaagcaagaagtcatagttctagaccggtcgctgcaggtcaactgttgtctcgtgaccccctttccctcccccagagaaacctccagcttttcgaccctgggtccttgaaacttcttgaataccagagacgagggacttgtcgcatggctatcatgtgacagttctggtctagaaggggaaatccacacatacttttgccgcgatctagaacctgggaaaggatcccccatcccttgttccgctaagacgaagaaggtacggaccttttggggcaccaaaacgagtcgcacaggcactaaaacccttagtctctcctctacccgatcttgagtgtcgcatcctgtggtattatgcatggtcgtctgggtggcttgaccttaacttcgttttagtcgttcattagagtacaaaagtgacaggcgtcgtgcagggggggagaaaagaaaagaacaaatcggctttcaaccagggggggataaaggtgtaaactgttgaatgaggtaggatcctcgagatgcattcgactcgactagggtcgtttgggattgattgattgattgattgattgattgattaatccggtttaggagaggaggaggggaacctttgattcaccatgacaagcaagttcgtaaagtcaagaggacaagcaaacaacgcaccatttcactttggactggtcaattaatttcctggggggggaggtcgaggttcattcccagtcctgtgctcccgtattttgtgtgtcttatcatgagtattattattcttattgaaaatattccctcatggaacaaaaaatacgcttttgcgtgcttggggggaagcaaactctatacgcccgtacgaccaaagtttgagatgcattggcatgttcggacgcaaggcggtttcggatgggccgagtcgtagtatataccaatactaagtatctagtatctccccttgggtatgaatccctacccaagccccgatccatctggtcgacaatggtccagccacggccgtggtggaggtctgcagcctgcatgcatatgtcgaggatgtcgtccatgagggactgtcctttgatcgtcgagctgacactagaccgtgaagatcgagcaaacaacaacaaagagacgacgaactatgtcgactccgtcaatagctctttcactttcttgttgtcgagaaagaggcaggtcccgtccgagcacacgcacacacgcacacacacacacacacacacacaccaacagacacccacaccaacagacacccacacctaaacgactgacatgcatagtctttgttcaagacacgcggtaagctgactgttggggtaatcaatgagatttgcatgcaaaggtaatacatccccctaccgaggtttatccctgaaagaaaagaaaataaaaacattccgttcgcatctggtgcagctgtcaccgtggccgccactcagatctctcacccggcgaagtcaaaccccccgctttgcttgctgggcaccgacagaccggatgaggtgttcagccgttagtgtgagccggaggattaatggaacccttctaatagtacgatgcctgcgattccttaggttcccttcctagttttcccagtctgtttccgtcttgggtgacgggcgctatcattggcggaagcatattgatagaatgggaggttccagccaatgtgactgagtccatccatggggacggcgcggttaatggcggggaccaatcagagaacaacacgggattttaatcaactcattctttatgtttgttattttattttatttttctctctcattgactcatttcagcggtaataatgatcaccatctttccgtctccggttggaaaaagatacaccgtaatcgaagaaaactatagatagtccaagtcagactattcccgtggtgatgaaaaaaaagtaaagagcaaaaaaataaaaaccgcccaagaaaagaaaagaaaaagcttgcgtgtgtcaaagaaacgtccccccaagtcagatagtatttgggctgaccgagatcccaatgcacagcagacccgactgggtaaagcccagtggggtcggactagaaggcattcggcctagcggaagactccagtcaacggatcggccaaccaggctgccgcgcgacatcagccgaactgccagcctgacaagacccagacccagactcaactggcgcaaggatctgatgggatgaaactaatttagcgtgtctttttttctcatgtttttctcgttttgattattttctttacagaggagagtgttcgggttttgcccgttccggaagagaacaagtacccgcaggtcacgatttctgttcgcttctgcgctcccgattgattggaccatcggccccaacccagaaactgggacctggaggcaattgcttggacttcgtattctgcaggaggcacgggaacagttttagtctacttatgctcgttggaaggatcattaatcacgagaatgaaggacaggttgggactgattgctcggtaatctgaccaatccgtgggccgccgaggacgtcgcgtggatagcttacttccgacctactaagaagaagtaggagtagttaactcatagtcctctagtatgtactccgtactaggtaggaataggaatgaagaaggatagcaaaagcgaaccaagcaacattcgtttgccttgagacgaggaatggttctttggatggatcggggaaaggtccgtgcggaaggcaaatagcctagagcagtccataatacgagagcagagaacttgttcattgtcccttggagtttctgaatgcggttctcttatttgagacgaagggcctcacaattatgcagggtgtaaacaatgcctccaagagtctttcatcacctcgttgctgtgaagaatcaaataaaaatggtgactccccaggtccctcattatgtgcatacagacatacatctggggggagggtccgtgtgtatcgtccgttcaagtactaattatatttcctagtctaggtaggtaccatatgtatgtatgtacttagtcacgaaagtgatagctcagcctggtcagctttcctccctccattccccatctaccatgcattccgggacgcaaggagggccaccaagcaggaaaaggaataatccaaacatgaacccacctgagaaataaaatcaaaatgtgaatgtcaataaaaacacctccaggactagacccgatccaaaagatagctcagctttcaactatcacgagaataaacaagaaagtaattagatgcataagagtaaaaaattaaaaaataaaaaataaaaataaataaataaataaataaataaataaataaataaaaataaatcaaatcgcttatgtgacccctttctggcttatcggtctaggatttctttcttctggatcggatccataccgaagctggtccacttcctgtatcttttcttttcttttcttgctttttccggctgttgtttggtttccatcgacgtattatataatgcgaataggacagtaattatgcttttcataggttataagttataactctctccagatgtcgatcgaacacggatcccctcccaagtcgcagcatcgatcgtccaccgcagtagctaagcttattcaaccatgctccaccaaacagggaaacactcattaaggggagaccgctgagtttcagaagaacttttgatgggacggcagcactccaccggcctggtacgatcgatagatgtatcattgatcatccaacgagtacaaagaatccacgcataaaggagagtctgatagtcatgagttgagcaagatgactgtcgttgaggtcacccaatgcgacgtcttccctattcggtaagagtcatagtaaacttattaatataatctaatgatgatgatgatgatgatgatgatgagagagagagagagagagagagagagagagggaccgaagagaaagacaaatgacagcggtcacgagctttcatatgacatgattcataatcgtctcatcttactagaactcttttattattttttttctcaccagtactccgtagcaggaaaagaatacttccgtcgtggtagactcagggtacagggacgaagtaccgtaccttaacaccgacccttttttaggttgccttcgaccgtgggtacaaaccgagaggtggatgtggactcttttggagccctgtcaaccacgttgtcggtgttgatcagtgtgttaattaccgtctgatgggcgtgttctataattataaggagggagtcccagtaatacattactagtagttatttatgatccagtgatagattaaaattactaaggaattcccgttggttctggttgaattaccctgaatgttcttttgccttctgcggacatttgtctctgactcttactccgtacttactctcgccccctcttactccatacataggatactctcccgttccatttgctcgatttccctgacctgaccgagttagtcagagctcagcaaggtccgatagggaaagcaaaagaaaggaaaaaaggaaattctgggaaaactggttggtcgaccaatcttatccaggtcgaactaaaccacaaactgcgttagcctccgtgtttgattcactttttcattcgaaaagaaaaagaaaaagaaaaagaaaataaatgttctttttgaattttccatgtttttggaaaagtcaggtaatatttgacctgcttattgtttcgctagttgattaatatttttatttctttttctttttcctttttatttttctcaattctttaattttaattttcaaacccgacaaccgcttttcccatcgtccccgcgctggccagaccgggcgctggactggtctggatacgtccccattcttgctggggttttggttctcgcttttttgggttggtggtcctgtccttcaccttaatcattgatacgccggttcggactatacaaaaaccaaaatcctaatatgagaaaaataaaataataataataataataataaaagtcatattccctccggcccttttctttcattccactttctcttcaccacaccttctcatccttttcttcctcagtcctcatttctcacgcaacaaacccgcgcgacaacgctgcccttaacctccctcaactaatccgtcgatcgctcagctaggactgtcactcatctccgcacacagactctcgatcggtgctattccgctctattcgatctataggcttccatcattcaccattcatcggtgtgatcgtttaatcgtttgatcgattccacaacaggccatgcggctgtcgtgacttcgccccgagtgttgctgacgccttttttttccccctcgtggattctgcgttatcggtgattgccgacttatcatccaccgccaggatatgcctcccgtgtaaagaatttgggtggaaagaacctcgagaacccgcacgccattcccgtcgactcgatccagtgaccaacgagaatcgaatccgctagagtctgtctcattctccgaatcgcatcttccttctccgttcgtgatccgtgtagatcgctgaaccgcgatcgtcgcccctcctggatcctccagacatcgctggtggcctgtctggcaatcgatactgggcaatcggaggcgatacgggatattctgccggcacgctgacctcgaccttggctcatctgccgcccctagagacgcccgatctgtatcacccgctcgggttctcgcgcgacaccaccgccaacctggctgctcttgcggttccgccaccgggcatggggacagcgctggatgcgctgactgcccctcaaccgttgaatacccgtcgacccgcggcgcagtcccttcccagcttcgagctgccgcccccgaactttcacatcggaggagccgcggtgaagtaccacccccatcccgcgcatccacagccagcgaacaatcacagtgtcaatagccttctgacgccgcccgcctcgacacagtcgggcgagacgccagtgcccacgaccgccacggccgtgacgaccgccgcggtctctgcatcccccgatccgacctcgtcctacgcctccgcctactggccgggccagagttcatacactactgcgtccgcggcaccccgccagtcctggagtgcgggcgtgaatccctaccccccgcgcgacaccttctctccctcggtgaaccatctccatcgaaattcggcgacctcgcccccagggaccgaggcgatccccagccagccgtacgacatgaaccacctacctccctttcagcaaccgctcgcatcgagcatgccaggcccgaactcccagcatcatgccatgacgcatgcgatgctcacagcgcagaatgcgctccccaatccgcccccggctccgccgtcgctaccctcaaacgacccgtatatgactaaatcctcgtccgccccctcctacaccggaatccagcagatgtcgaatcacacgggggcatatgccccctacggacagactagcttagcgattcatccccccggacgggtggcatccaacccgcccccgcatcatctcaactaccagcgacagccgtggccctcatattcgttaccggccatgaacggacccgtgatgacgaacatgcacaatccgaacggacagatgtcgctcgtcggcaatctgcaaccgggcctgttcaccagcggtcaattggccatgcagcaaatgtacgggggccatccatcccacgcgggccacccaccgggtccgacgaacgaccgacccttcaagtgcgaccagtgcccgcagagtttcaaccggaaccacgacctgaagcgacataaacggatccatctgtcggtgaagccgttcccctgccatcattgcgataaaagcttctctcgcaaggatgcattgaaggtgagatctttagaacgcaatattgtttgaagtaaaacaaaaactaactgaattagcgacatattcttgtcaagggctgcggcaaagacgtgtccgatgcgatcccgaagcaggagagtgaatcggtgaaacaggaagataaagacctggaccatggcctgtcggtttaggctgaccctattgttgtttaccccttgatctcgagcgaccctcatgatttcccacgcgcatcgacctacctttctcgacctcacctctcgactttattgttctaattctcttgtgtacgctccatgatgcttgtatttggcctgtatgtacttggcgagcggttcggttgggacgattgcttgttttttcttcgttttttctttcgtgatatcttgtgaatgatttggcatcagcgagggatagccggatgtatgtacacgtatgtaggtagaggcgttgtaggagactattgggatcagtatttgatggcaaattgatttcggcatgagtctatttggtgaatttactgtaatgtgtacccatatgtattgatcgtgattgttctaatagaactgagtaattctaagtccacgtatgcctatagttacccaacacatatagaaaaacaacctatattaccaactacaggagagaagaccctacaaacctcacaaacactacaaaatatacaacaaaacaaactacaacaaacccacatcatcacagaaaactcaacaacattagcaaaagactacccacaaatacttctttttggtttgagaacggtatatatacaatcaccaaacaaccactcaattatccttcttccccaccttttccttactatcaatccattcttccactaaccccctataatcctctaccccatacggctccaaccacttcaacccgcccttcctcgtataatccagccccaaatccctcaacaacaaatccacatatggcaccgcatcaaacacgaaatccgggttccgtttcccaaacccaccgcggtagcgatgcaccccgaactgcgaatgcagggctgtttcccagacgagatctgcatcgacatccgcattatcctgctcgagcaccttccggagatgagggggacactgttctcgcggggcaggggtgaggttttcggtgaaataggctgagatccagagggcttgggcttgagcgagcatggtggtgttgattgtcattgcgagacccatgaaggcgattgacctggtatttgcgagggcgggggggatcatcaagcgggcgagacggaaggggtgttttgctgctgctggggcgtcgggagcgaggggggcatagttggctggtttggggggtggggtggccagtcgtgggaagcgggagaggatctctgcgtcggcttgttggatgacggattgggggatggggtcttcggcccaggggaagccgagggtttgggagagggtcgagggtcggaagtcgatgttgggggttgcttgccagcctgtggcgcagatgagggtgtcggattggatttgggtgccggaggcgaggtggatggttttgggagtgaggtgggtgatgtggtcgatgtggatttgcactttgccttcggtgacaaggtcgaagaagttggttgggtagttgaggatgctgaggcctgaggcgatccagaagggactgaaccagggtttgagtttcttggtttcagggtgggagtcgtatttgttcagggtgatcacgtcgttggccaggatggaccagaaggtgtcgacgattttgcggccgagccaggtgccgtgcaggaagttgcggatggggctgcagccgtcggcgtcgccccagatgcaggggctgaaccaggtgaggaggcgcgtggtgacgagcttctcgagccatttcttcaatggggttacgtaggccggggccatccagacggggccgtggccgttgtcgcggatgatccagtcgacgtgggcgccggcggttgcggcggcgtagacggcgtcccaggcagatttggtgccgccgaggacggtgatgcgcttgttgggttgcaggacggcgtcttggtgctggggcaggtcgcgacagtggaagagcggtgcatcgaaggtgtcctggccggtgatagtgggcatgtagggctgggaggtgatgccggtgcagacgatgagctttttgctcacgacggtcttctcgccgtcggtgtcgtcgatggtcagggtccaggtcccgtcggaattatgttccgcgatgcgcacgcgcgtgttcaggcggatgaactcgctgagctgaaagtgctcgacaaagcgctccatgtactgttggatcacggtgcccgggatatgttggccgagctggacgccgaacgaggcgtccatggggaagtcgctgaactcataggtgcccagcatgttgttggatttgaggccggcatacaggcggtgcttggcccagacgccgccgaccgaggccgcgctctcgaatagcacaatcgaggcggaggggtcgacctggtggtaggtcttgagggcagcgagaccactccatcctgttggtgtgacgtgagttggggaacttgcgacgtatcaattccgacgtgtggacatacccgctccgatgactgtcacgtcaacagtctccatggtgatcaattcacaggtacatgcaatgcaatcgttgcaggattagtttcaatggtgatttgcagccgaacaccgtcccccgcaatggccgtgaagggtatttaaggagcagcacaagaggggaagcccgggtggagtgactttgacgagattatattagttgagtatagcacgccgatcgcggaattttccctcattccccggggaccagggagaaacggtcgaagtctcgaaggtcggcattcccacccgatagccaaagactggcgagatggcaagaaaaagagttttttaaattggacgcacggaggctagacaattaggaaaattagaagaagcgtggttgcatcgcgccaccgttaagttcggcctagcgactggctaaaacggcgtcgggattcaaatgaggtaaaatcggtggagcagtggagtttgacaggttattatcattggggattctcccgggttctgcagtcgtttcttagcctatgtttcaggtggaacctgctggttgactatggattagtacttttttaggggtggagcttgtcattcttcaagttgacagcccaagatccacgctggacgtatgcacaaaacaatttgtgtttgactttctatccaaagtcagatccgatagaggttcatgcgagatgtagggtatcacattagattgtctactgtcaatctaacaagggtgatcgccagataatgcatcacaaaccctaaacttttccttgcaggacgacggtccgagcaggcaactagcccagaaagtgcttaagcaatagctacgaatccaggaaataactccttataaatagtaatcgtaatcataatccctttccgcagccgacgctccactgatagtccatggccaaacgtcggggagccaccacgatttcccaaacgggtaaccctaagggcgctcattcgaagcgaaatggagactgacgcaccggacaagcgtttggcgtccccgctgccaactgataacggtccttcagacccaacctgtcgggccatgtgcttgtcggacgggaattgatttcgacccgtttccccccctggatagatacatcgatcttccgtgcgccggctttccggcctgcgcaccatccagctataaagctacttttaataccaaagttcagcgcttttgcctcccctgatcttccccctctgttctcttatgatctgagtcccgcacagacgtccatactgccaccatggccggggatgactttaccatcgaggccttcaccctcctcgccatcgcaatcgttaccatcgctatccgcatcaccgcacgatggatcaccgctggaccgagaaacttccagctcgatgacttcctcatgcccttagcgggggtatgctacccctcctccacaataacatcacccagggtactcatagacaaaacaggtggtctacgggttggaatcgggcgccgcttactgcgttggcgcttggtggatgggtctggccaacaactccatgaccgatgagcaacgagccacgctttctcccacttcggaagaataccagctgcgcgtgggcggctccaagacccaggttctgggttggtcgctgtatacaaccctgctgtggttgttgaaagcttgtatggcgattttctactcgcgattgacgtacgttccttccttcgtacatcggttatcctttatatcattcgtagatacgaatgcgacagagaaaatgatagctaactaattggatctagagccggtctgatcaatatgcaccgtcgtgtccaaatcgcctacgtcctcattggcgcaacctatatcgccgtcatttgctccatcctgttcggttgccatcccatgcataaaaactggcaaatatacccagacccaggcaattactgccagcccgcggtgtcgcagatcgacgtctacgttactgttactttgaacgttgcgacagacgtatacttgatatcgattccgacaccggtatgctgccttcttccacgtccctacaagttctatgcagaagtactatacacacaaagctaacaaacgaaccaaagatgctcttcaaagcccgcctcccatggcgcgaaaaactcgaactcctcgtcctcttcagcggcggaatcttcgtcatggcagctggtatcctccgttgcgtgttaattgtcacagtacgtctcctcccctaactcccaactcccaactcccaactcccaactcccaactcccaactcccaactcccaactccccagtccaacaccccaaaaccaccacactcccaaacaagctaacaaagaacaaaaacaggccggcgcaaacggcgcccaacaagccggcagctgggcctgtcgcgaaaccttcgtggccgtcataatcggcaacgcccccatgatctacgccctatgtcgccgcatcgcccgccgagcaggctggtacatcagcacgaaaggcgtcagcgcaaacagctatccgttgacggatagcggcggactgaactccaagagtaccatgcatagcagcaatcggaaacggaagttcaagcatccgttgtcgttgccggatacgcagtatcatgatgagcagacgattttgccttcgcagccaacgatttgtgaggcggggactgggaattgggatgaggagagtcgggggagtcaggaggggattaagattgttagggagactattgtacggagggaatagtttattcttttctatctttggttgtttcttttgtggatattgatttttcttacttttcatttttatttcttttgttttctggatatacacggatacctagtgatatgattgattgatatatgtacaaagaataagacaggacatagacaagacaagctcatgatttaattaacatacctacctacaaaaccctaatacttaaattaaaggaaaaaagaaccagtgggtcaaataaatgaaattaatataaaccctcccgtccaacccacacccaataaccttatacgagaagatcaccccaaggccccctcgtataaaaacccccggaaaataaaataaaattaaacctccttctgaagagcagccgccccatcactcgcaacaaacacttcatcctttttcaacgacgccttgacgggactcttggcctggaagatggcggtcaattcttccagggtgcgtttgctggtctcgacgaataggaagtagatgatgatgaattcgaaggcgtcccagaatatgaataggaagtagtatttccagccggcgccggagaaggcgattccggttacgaaggtgttgtagaaggaggcgatgttgacgaagaactgttctttattagtatcttttcttgcagaagtgagaagtaataatgaattgatagaagatacgtacgttattcatgcccattcccttagcacgactttcatatcgaagacattcaaccgggtacatagcctgattcggcgtccaaccggccgaatacacgaacccgaagatgaagatcatggcgatttgagcccgggctgtgatgccgctcttagcgatgggctcgccatctggaccgtccacgacgttggttgcgttcaatgccagcacgatggcgaagaggatgacgatgataccggttgagaggagcagctggggccgacgaccgacacgatcggtgatgagcgcaccgaacacggcgccgatgaactgcaccacgttttgtagtccttgcaggaggagtcgggtgttattgttttcgatacctgcgccacggagcatctgtgggtagtagtaggagacggggccgttgccggaccactgcccgaagaaggctatgagacttaattagctgggggatggtgatgagctgcagtatgtggtacatacccataaagataacgagcatggatcgataacgtgtctcgcgactgttgaatagctcccggtaatcccaccagcgcttgtctgaaccggtcatggaaatatcctccaccatctcccggtactcgagttgcacgatgggcgcgttgcgatcgccttctccgtggtattcggctagcaccttgagcgcggcttcgtgcttgtcttgggagatgagccaacggggcgactggattctgttagtttcgcttgtttggatctcagactggagtgacgacctacctctggcacggtaaagcagaacaaaagtaccagtcccgaaaagatcatctgcagccagatcggaatccgccagctcatcgtcccctcgatatcagccgtcctccacgggatgaaggttcccggaataccaccgccgaaccacaacacgttgtatagacccgtcattgcacctcggtacgcgggatgggccatctcggagacgtaagccggaccggccgtggcggaggtcgcgacgccgaagcccaagatgaatctgcccgccatgaagccgcccaggttatggcatgtggcttggacgattgttccgatgataatgaagatggagccgagggccatgccgacgcgacgacctatgaaatagcgacttagccgggtttgggaggtgatgtgtatggggggaaaggggggtacctttgaaatcagtaaagggaccggccgtgaatgagccgacgatgtttccgatggtgtagatagcgtagacgattccggtagagggcgtaccctcgtctggatcgaacccgaagtatgatctgtattgttcgtagctgttgatggagcccatgagcgagccgtcgtatccgttgatgcaggagttgagcatggctaccgcgatacaccagtacagctgtattggtcagtggctgtctgttcatcaacgcaaatcataggtgcgataccttcagcatgctcttgctcagcagtttgggcttctgctgaatggtggctaccgccaacgcggcattgttgacgcccttgatctgggcttcgcccgggttgtcactgtgggacacagtggcatccaccttatcagccatgatgggtcaaagaggaggcaaagaagatcaggtcagtggatacaattacatagtctgatcaaaaaaaagcgaagccaagggaggcgagggggaggttgatatacaatataaaactccgagcgtttcggtgtatcataccattccaaccagattcggattaattacgatacaatacggattatattaaactgtgtcgtctgaacatattaaaggccaggatttgtcgactattcagccctgtgtatggacacagagacaccccgcggatgaaagtaacaaggagtgatccctccgtaacgaaaagggtataagcgtctatcagagttaaatctggggaatatggtactgggttagcccgtattctagcttcgcgggggattgtggaggaccaatacgaggtggtagattctgagatccaacaagctccccatcgttctcgtgtggtcagattcccactcaacctcgtggtctgcctctaaacgatggatgcccaagttagctcacgccataattcttgcttctaatggccatgccaatccaggaactatcgagtgcggtgatcggtccgaattgccgtgtccttttctcttcgagtaagcactacagtccagggtccagcccccatctatttaatttcctggggttttgtgggtggactatccggggtcgacaggattagcctgcgtccgttaagccaggattgcgactgggaatgcggccctaggatccgcggctgtcctgtgattgagtgcttgtcaagaattcgattgctaactagtcttagctgcagggtaaaagcgtctcgggaattaagcgacgtcaagacattggtccgtcttggctctgtcacgccgctaaacagtaaacaccctccattggcgtcgcttctcactgcaatgtttcaaggcatgcaaatgagatggaacttagtagtattgattacaaaccacatggcaagacctccaggctgttcattagtgcattccgttaggtattgacacgcgactgcaggttagctttccgcacgaacttgtaataacacatgatggtctgtggcctcgtccaggcctacttggacagactcaccgatcactatttttgggtttagctggtatgaggcgactggatcaagatcggacccgatcacttgccgccgcactgacttggtgaacgtcggttgctaccgagggacagtggcaacatggccccgagatattattgccgtatggcagagtctggatgagagcatgctcgtggtaaggtatgtggcgatgtgtcttctgagggtcctcatttccgaactgctaagcgagctaggagtcaaagcactggttcttatgtggagtgaagctacctatggggatgccggtgaagaactccctaatagacgtgctcctgcatatgtagaatatagttaatatgctggcaagcccctaactaacccgaaaaagaaattcacatctttgtagtttatatgcaccttgtgtcctattagatccggagacacttggtcccctgaagaagcacagactcactaacgaaaccaacttgacttatattctcatagcaggtatacatgctatcaatcaccagtctatagttactcctataacaatgagggcgtttgtattccacgttgtagcacacataacctagaagctaagaccgataaacaagcaccgcaatggtggatctcacacaaaatattcttttagagaatttaaaaacgcaccgacaacatctttactatgtttgtcaacttgcaagggtgaaacattagtgagagcggagattggtggaataaataaaaatcgaaaggtacttcccagcagccgaggtccttgggtttgatttgcataaggcatcgtgcattggtattgcagggtactgacatgggcctcggccgtatttaccgattttgtaattaattagtcggtttggctctgtttgctttatggagatgtcatttcctgtatgcgaatactatggtaaatagagatgcttgcattagccagtttgagggcagaaagaggattgtgcgcgggtgatgtccagatgcagatgaaccttgtcacggactctaacacctaatgtacttagggcatttcaggagcttttggtcatggtagatgaaagctggctacttgtgttgagtcacatcgccacatgatagcgcgtagtcgtggacttgccttttgagagcttggatcaatgaacttctatagtgcaatcacagtcgtaggaatttcgtgaggcttaagagacagtggaagattccgagtgagagagaataagcttctgaccttactagccaccgactgcagtttgcagccaaacgcatggtcgcggacctggcacggggcttataatgcttcattatgtcctaggtagcaaggatagtcaagactgaatcgaaggatgatttcagctaacctagaactacacaaacattaggctgcgaagcattggacttagcacttctcacttctatagtcaccaaattcaaaacagaacaactgcctgatatatgttgagcctccacccagcaatcggaaatggaatttgaagacatgttagtctttaatcggtcgagatcgacattgctatcattataggcgactcagtgtcacttattttagagattaacaatccaaggccttgcccataaaccattaagctatggtgttgccactatgtgaggctttgctcgtcgcacccaatacaacggtgaaggaaactaagacaataacttcactctgctggaaagtattacgcctgtccgtcaagtaagagttatggtatgatatataattactcgacctcatgcggggatggctaaaaagatcactaagtcggtgacgtagttaaaatatatatgactctggttattaaccacagagtcataacgctggtcaagtccacgtgggtatcgagtgtaggggccatgtatcacgctcctcccagaagaagttcatgttactcttcttctagtgccgagaataaagatagttataggtatagatgattggatgccgtggtttctatctgaatatgcggagtgtaaatggttgcctccgctaagatttatgtagaaggtaactagtaacaaacattgagggacattctccaatcagggtcgacgaaaatggaatagacggaaatttaagagttatataggaagtagtatgattttagctacattagtagctgaacatcccactttgctgtgcatacagttcaaacagagttaccggctatagccccagctcttctggtccacagatgtataggtgaatgcgcatacaggtttgatcatggtcagacaatagtgatgaaggtagcaagcactgcactttgccgtactaatgcttctatatgaaatattgttagatgttaagttgaagtccgagtaacggacgcattaaccaatgaccgctggcttcaaccgttcaataatccaaccgcttgagcagtccagggtggcggagtgtattctaaatagcgcagtctatatcttctcttgggatgttcaaccgacgagctcttccagacgtgcacttcgcatagccttaacagttcgtcacttatccctgggacacaacatataatgttcccactacataccaagagaaatacagccaactgctgatcataaacgttcagtcccacgccggacatcagcttcaatcagattcttgccaattagctttcgctacacatcctagtcccgacacttgatcaaaagggcgtgtgggtggtcgaccagaaacctgaaaggcacggttgaccacaatgaaattgtcgactacagaaacaatattcaacataaacaggaaattttgtagatggacagttatagtagaaattgtcagaagtcaagatattctttcagctcaaattagaaattatatggcttaagcaattgtaggtatataaaaaaaatccgactgagtcgtattaaattatagacaaggatacagagagcaaaagcttccatgaggtgaagtacatgaagcagctgcgaagctatatccaggctagcaacggtcgttcagtagcttatagggaacgagtaagcgggcgaaaagatagaatcgttttgttacctaggatatcttgctaaaacaacccataggcagatatggtcctttccgtaggttttcacaaacaagagatctcagcggccatcgaagaaatacatcaaataaagcattaaccacaaagtaaagacttgctaaggtaggaaacgtgtatacctcagcccaacagattaggcaagtgtaatatcttaagatgtacggattcaagagtgcttagtaccatgatcgctcgagttgaatctcaaaggtcggattcatctgaaggagctgatttagactcacgtatacatagcgtacaattatgataaggataagagccatcagcagaacaagatcattctttaaacattcctgagtgactcaatggtgccatatactataggttaatagacattgaaacttttcattgaatcttgactcataatatacaaccgataaatacaatacccaagtaagccaaccaccaaaataagtacacaaatccatccaaccccagatccccaaacccaaacctagaaatatatatcaaaacgccataccattcccattcccattcacagccccagccgccaactccctcttctcctccggcgtaatatacaaactaagcgtataatacctcccctcaatcaactcagactcacccttgggatcccccgccaaaaccaacctcgtatgacccgcaaacggcaaactaaaccacaccggctgcccactccgatccgcaccctcccagtaatccgcattacacgacatgctactaccgaatagcagcgggttgaaaccattacacacggcctcggggatatgcagcacatcctccaacacgatgacatgcgacgtcgggtcctgcgggctcctacacacggtgagatgaacggtgccaaagcccgcgacgtgtagctcgtcggtgggattgaagatgttgtttttcaggcgcaggtcgacggagcggtaggtcgtgaatacggcgcggtccctagcatagtgacagtttccagatacgaccatccagtcatagcagatgcggttcgcgggatgggtaaccttgtttcttttggtgggctggtcgggctcatcttggtcggcgaggaattcgtcgtgggttcgcatggtggtcgtcgtcacgttgggcttggtaggagggtgatgcgcggcgggaggaagtggttatggggtcaattgggtcgattgtgagggataacgagtgaataaacctgggataaggacaggcagtagttggacttggtggctcaatgatttatagaccgagaaaaggctctaaacagataggattgaggtgaaacagacgcatgatgtatccagccctgccggaacaaggaaatccggcagtaatccttacccggtaggcggtgcttaggtctcagccctgaagatatgtaggcggtatatggcgacagtatagtttcaccgccaaggctaaccaagttgaggcaaagcctcggtaattcccagaatgctggtatcgcgcggtgattggtgggagatatccccactagaaccgtgacttgaactagggctaatggaagttaaaggtaacctcagaaagaatgatgtcttgtacccacatgtccctcagagtctagtttgaacactataatctatgatgatagggaacctgagacagattgcgagacttgcggctctccaaatcactttggggcctctgccgaaaaaggaagggattcgggatttgaatcactagggccttaatggccttggatggtggcagcactaccggaaattctcggcgctcgggtagtccaactccgattatgcagggggaacaccggtcttgctcttagcttcctttctgggcctgtcgttgcggcccaatgcaactgtgcatttatgcagctatcattttactcgacgctttgaccgcagcctgacagcgctgtcatcaaggtctatttagtctgttccgctactagcatgttaagggtaaatggtcatagacacggatgggtatttcttggcaaggttgtgcgatctgagtagatgtagcacaaggaatgggatagacgtcttatggcgcaccttgcatgcagattctgtatctagaaaggttacgctcgattcctcggaattgcggatgctattaatacaatattactcttttaggaagtagttcgtagagaaccttgaatgctcaatcatgtgtattgttggaagagattgtgtttgctagccacaaacaaaatccttcccttgcctcacaaacggttcaattacccttccctcatgccaaatagcgtcatttgcttgtagcctatgcccccccaaaccacgcttccaagtaccagcgcaccaaagacccacccccttgccgtgcaaggctgcgcaaggagcatataatatccaagattataggcggagtagtgaaaaacgaagcggctagttgatccactggtggtgaaaaagagggtcgctcggaaaagaatccctttctgactgtctcaacggcacgatctacaaagaaggaaagtcaggtgagaaaggtgttgagcttcgtatccacagtattagccaatgagtgtcctgcatgcagactaacaaggccgatcaagaccgaccatatgaacagaacttaccaaatgtaacttcaatattaccacctgcgtgcagatatcaagttactgttgaaaccttggaaggaggagttctttgttgtcagaactctatgttgcagagtgttcgcggctgagtgaagaaccaagtatatgtatcgaaatcgagtggttgtcgagtttccacaactctaagcctcttaaagaaagagagatatcattggccaaaacaagaatcccgaggactctatgaacagcgagtcaattttagacttgcctccctggtatgacgtacatgcttcggttgtctgacgacgatatcgggaactagactacggggagaagatacggtctaacaatgtggcttgaattccaccatatgaggggtactgcgagcatcctgtggaaagatgtggtgaaacatcttggactttacgcgtcggactgctaaggaatgacctatgagcgacgaatcacgccgccacccacttgtattattatggattatggcgagtgcccaccgctagtattgtgtcatattcgatagcagttgacatatcgaagtatacagctagttgctatcagtgtctaaatgatgtggtggtattgtggaggcctacgctttctcgggcccttgtctatccctcactacagggatcaatatagcaatcctacactgtatgtcgccagacgatgtacgctgggatggagccatacataaccacatatcgtccggaattgcgaaacatccaacgctagcgctctaggttgtaagacgggttggaacaggcctataataccgtcggtaaggacctggaattgggattgctccgcatatgtgcaatcctgactcggccgataaagtttctttcatcgtgtaaattgtgcctttgggcccgtattcagatccggttagacccatcaatctccttactcctgttaggtccatggataagagcggcaatggtggttccaggttggggttggataccaaagactcgcattggttatgtctaaatggaaaaaatgtttctatgatggacgatcgttgaagaacaaagaaaatagggttaacaacaaccgcggctaagctctcctcacagtgcactcgagagtgtgatatagttgagaagttataggccaccagtttagcgcggccatatggcgaattaattgtgcatgggttaggcattagtatggcgctaaagacaaagttgggatgggatcagtgtcagatcatcatgccagttacccaaagtatagaatgggcttcacgctcaggacaccatttgaccctagcgcgaagatcaatggggatctgtatgcacaaatgccacattctgcataccccggccattggtcactgattaccaccttcccacatttgtggccaaagtatgcccaagaagttttcgctgtttgtttgtctgcagaagttccatgtccttgatccatgataaggtccattacggaggatctcgggccaacctcattggcctggaacaattcgcgcaaggatcttggcgatgacaagtcacgatactagcactgacaatgaaaaaggcactaaaacaatagtatgatttcggtcgtaaggtttgtctcactatttttttttttttttttctgttacccgcatgacaagcctgatagttgagactcggggcggaaaagattgtccaatgagagggccaatcggtagaatcggcaaacattacccgtttgtctgatggtctttgctttgatgtggaccgaccagggaggtatagatctcgcgactgtcacagtccaagcatcattcgatatctcctagtcacaaatagatctgtccattgatggacgggtgatatggcaaattttagagagtggcaaatatgagtgaagctcccccgtgggtcggtggaattctagaatggcgaattaatttatcctccacgtgagacgtaagaacggtggggtggttggattcccaatgattcggattacatccctgtagggccccgtctttaaggtacaggaaggagaagatcacaggatcgggccaaaggattgttactgtacctgctacctagtagagttggttggggacttctagactttggtagttcgggtgctaaattagggcatggagaaggctcggacaagctccaacttccgccctatcacaggatttagatccgcggttctacggccgaaacattgcgttggaacagagtccactgcctgtcaagtgtacggagtacggcagatggttcttaggacctatcaagaggaccggaagtcttgaatccatttgagattgaagattttgggcaactagtatcgaggctagggctaggtcacgggacctgattgggtggcttttactgccgactccgagtggagatttggagatctgcaggaggagaagagcagctgtcgtggggccgcggaattcctctaaaaacaagatttccagaatcattcgcccgcaacttcatttccttaagatgcgtctgtaccaattcggggtaccgccgcttccaccaccacttgtagtcccggaaacctgcgctttattatatatctaacgccacccttcatgcctctatcgcgtaccattttactgcgccattccgacctccgatccatcggcccgcgcctcttctctttatgtccgattcgaagtcatcgtcgtcctcgcctcgtcctctcgcaccggctcctggtcaaccccccagacgaaccagttctagcgacgatgtagtccgcgggcggaaacacaaaactaccgcttgtagggcgtgtaagctgaaaaagctcaaggtgagtttgctttgtgctcgatcgcgttcgtcctatactcctccccttacctttctatacgttcctataactaggactatcgggaacagtccttggccgatcagagtgccaacgccacggctgatgttgctagtgtcgaggggatccaccgtgtgagcattgcactctcaatggcattgaatgtgtggttgatgagatggcggatatgcgtcgaaagttagccatgaagcggaagctggatcgacttgaacaagcggaggacaccttgctacacctaataggtgccttgcgagggagtgagaatacacgcattgcacaactactgaacctcatccggagtaatgcttcctttgatgaaattgcagtgttcttggagcaacagttttctcgcgcggagatcgaaagatcacccgagctgcgtgagttccggagtcagctctcccgaccatcagacgaagacgacgacgatgggaacgaggggactgcacctcgaattccccggcggatgctcgaagtgcgccgcctcgccgatatccccgtgtacaaggttcccgcgaagccttggacgacagtcacagacgatgacgatctagtgtcacacttggtgtccttgtggttaacatggacttacccctggtttgactggctagataaggatgccttcattcgcgatatgcaggcagggaatttgaactgccggttctgttcgccatttctggtgaatgccatcctctcagaggcgagtgtacgtagcgtagtctgtatgattcaaaaccaatacacgaagaattttattgattggtgccactcctcagtattattccgactacgccgaagtctttaccgtccccggcgatatgttctctcgcggcgaccacttctacgaagaggcccgtcgattactcgaagcagaggaggaagaggtgccaagcagtataccgactatacaaggccttcttgtgctatttatacggtcggtctgggtgacttcccgtgagggttcttggctaacatattccaggcttgttttgatgggtaaagatcgcgtgggatggatgtatatggaccttgctatgcgagccgcgaaggagtatgcttcttcgcacccgcctcttcctatcgacacggaatcggtgcggcagatcgagagcgtggtcaaccgaacattgtggggagcttacaacatatcttcgtatgctaaatctccccatggcgaaagacaagcaaactgacggttgaaggacggccgcggtgtccttgatgaaacacatagatgtcaccccccctccgcgaccgcgtgtgcctatcaaccatgacgatcgtctcgatgtatggtctccctatcctcagctagtgcagccggtgcgcggtcaccataattgcgtattcgaccggtggtgtgacttttctttcatcacgctccgaatcagtagagctctacatgaccctgacaacagtccgcctcaatgcgagatccccgccatcatcaatgacatataccagcagctacagggttggtacgcgaacttaccggaatgtctacgcctggaaaatgcgaatgtaccacatattcttagcttacagtgagtccactagacgaattagacgcgctatgatctttttacttgctaacctatctcttctagcctgttctaccacacaaatgtcatgcaaatctttggattcctccaatcaaacagcggcgaagctataaccccggagactgcgaagaacgccaaagacctctgcctctcaaccgctagacgcatcgctcagatcctcagtatccaccgtgagaaatggggcatcgaccgtctcgctccatccaccgtccaatgggccagtatcggtctcttcactcttctcgaagccctcgactcacttgaaaatcggaaagctttcactgagctttgtatttttgcgcgggctttatcccgacgcttcggtctcgccaagggcattcttcgcatgatccaggtaaccgcacagcagacggaggtatccttgccgccggaaacagacgccctattcttggacttcgagacgcagacttggcgcaatcgggattcgcaatcgttcagcagtttctatccacacttttcgacagtaatccgacagggaaaggttcgacaatccgacgtgagtatggatcggtttttggagaaatgggataatcttgatattggcgacggaccaccccggagggaagaggaagagtgaaccatggggataagtggttgatttacgtgttatgaccatcagactagtatccagacttgcgcgattgtatagcgcctaatagactgaaaatttcagccatacacctatcttttctttttttctccttctcttccctttcttctgttcttctctcccacatctttcctccccttaactctctcttctcttcgttttgccccgcagttccccctatcaccgtaaaccgcacatccgttctacgcccaatattccctcgatgacgcttatacagaccttacccttttggtacctctccaaccctcttacccaagccacaccaaggtcatccatatcaaagagcaggttggtctgtggcaaagtacatgtcctttccaattagaaaatccttgacatcacaagcgacatctcaagctccctgattggcccacccgcttcctgataaccccacataaaacccaacaccaaaacaactcgcagtagactctatacaaactttcaaaaaatagccctctaagcacctccgtaaataaccatacctacatatctgcaactcaagtacaatggaagaagagaagagaccaccgctaccaacccgaccctcccaaaccccaacagaggagaaaccccccactaaagacccctatctcaccgacaccagtaaacatcaagaccaggaacaagaccaggaacaagacaatgaggaaacaaatacaaaccctgcattaccagcatataccccaacagttctaatccaaaaccaaacatcccacaccgcctatcgaccctcctccatcctccccaaaccagtcgtcataccccgtatgtctccctccccttccctctcccctactatctatctacctacctaaaccccaacaccacaaaccaaaactaacaagaaaaaaaacagaaacatcccactcaatccacggcacaatctaccgccccttcgcgcgggcctacccaccaaccctagaacgccacggaatccccaaagccgatttcctggccttcatcgacggcctcaacgccgtctgggtagcaaacccctacatccaggctattagcacgaccagcaaggctgcggtgtttgtgccggttttgcaggtgcagattgctgcgttggggttggcggctgcggcggagtatgggtcggtgaaggtttcgcagagacggacgacggagtatatgcgggtggcgaatgaggagttgtttcggccgagggggttgcgggtgcaggtgcttaggacgaaggttatgatggctgaggtggggattcccggggaggtgttggaacttggggagtgtggggggagggatgaggagtttggggatttggagggtttgggggatggtgggaaggggaaggagaaggagaaggagaaggagaaggagaagtatgatccgcaattgaggagggtggaggctttgaaggactttgtttgtccggttgtttatgaggaggcgggtgaggtgggcaaggagaattggataaagagggcttctgataagcaggagagctggcttgctgagaggcagaatagttccattgtggggaagagggagaaggctgggaagttgatgagtgaggctgatgaggcggagcggcagattagtctgaagatcgaggaggttgctcgtgcgaaggttgctgctgaagagagggctagggagaggatggatggcccattgggggagtcgttgcagggtaggggcatgattcaggatgatctggacaaggagatgaagaagctggacaagcaaatggagaagctcatgagggaaagggagaagaaggttacgaagatcatgaagaagggtaaagaacatctgcagaaagtggagaagaaagagagtcgtattgcgcagaaggtgatgtgggtggtggtgacgggggatgatggctcgggctttcagaaccatctttgtgaggagtcggacgcttgatatattgcgtttcacatattgggattggaaaatcggcgtataccctttgagtgatatacctgtgtttaattatagttgcattctattctatttttcacattcggcttgcgatcacagaacgtatctgaagaatgggttctgcttgtcagtcagatcatggaacgccagcttatccctttggctctcatcgaggtccatctggtcccggcgccgattctccctccagagcaccagatacagggctactgcggcagcaatggtgatgcaatagcaaatcaccatacccgtccacagctccggataatgctggcccacggttttactattgacaagttgtggcccgatgatgttaccgacggtgtaagccacaaacaccgtggccgccatggtcttcttcgtagcacccgccacattgctggccccaagggtgataattagactgacaacaggtccgaagaaccccgtcaatgcgtagcccacaacaggggctgcgggttggtatccccattcggacttccagatgatcacacatccagcgatgacaggaaggcaacaagcaaccagcatgggaatgcgtgtgttcgggatacgtgacgagatgtagccgcataatgggatgaatatgacgcaaacaccaccaacggggaattggaataagatcgaatccagtgtgttaaagccaaaggttgacacgatgaggggaccgaaaccggaaatggcaccgttgatcgtatacctagtgacatgtgagaatagttttatgtgatggcgtggaagatactcacgcagaagccatcattatcgcaacaaggtacaacttcaggtccaggaacgactccttaatgtgatcccatttaatcttttggcatcgcacacccgtctgtcctttccgcagtcgctccactgcaacaacccgttcctccggggtcaggaaccacgcagagacaggcgagttgggcataatacagcaccatagtccaaacaggaatgtaagcgcaccggcaaagatataaatgtattgccaacgtttcagtgcacgagagctgatctggccgaaagcgtagttcaaggcaccgccaataatagtgaaccacccagtaccggagaaccaccatgcctgacgcatggcttgctccttctgtgtatagtagctactcacgatagtcatgaagcccgtgggaaccacactctcaacaaaacctgaaaccccgtcagagacattgaccactggcaagggggttggatagttataacacgagaagaaccatacctaggaagaatcgctgtacaaacaaaccctgccatgtcttgacacccgctgtagcggcacaggtaatagcccagagcatcacaatggggccgaatacatattgcgttttgaagcgctggaggataaacgtcatcgggtacaagccggccaacattccaaaatagaatatggaagtggcccagctgagtcgcgatgtgtccttggacggaggcgatgtggtatgatcgataacaagtagttccaggtcagttgtcataccgaacagagatgcactccccaagatagcctaaacaagtcagctcggactcttctttgactatcgaactcattacaactgactttgtcccagtatacaaatccatatcctgaacctcattaataacggtacataactttagacatatattaaaaacctacctattaacattgctggcatgaagaatagatcgatcttgcgcagcacacgcttctccactgccgggtcgatctcctgcgcttcgtcgctcaccaccgccaatgcggcatccttgtcgaatgttggggcatctggagatgaggggcgttctgccgtagcgctcggcacttgaatcattttgacagtgagcgtctttctagaactcagcaaggaacattctgagggcaagattcttctcgatggccgttgagaggaaaaaagaattttccaccgattcaaccagtaacagatggcttagtatgacttcggtgagagcactaaacactaattaacggaagtttacgacgccgatggagaatatggggacatttgactggcccagcaaaatgccaaagctcgaattgagtggattgagtggtgcggaggactgcgttcctgaggccacatttcctattcgggactagcctggggtccgtacccagcatctggaggtcgaactgatattgggatcgaccttattaaacaagcatattttctatatggttcatggacgtcccattagtactttgatattcacgttagaggagagagagaaaagtgcactgaccaggccctccgccagagaagcgagtaacatgccctcagtagctacataggttaacttgaaagcggacaggtttagtaggctggatagatcaacgttcgctacagaatgccgcatatgacacgtgtggctgcgtccataatgtaacctggaagatcttcaactgacatggcgttttgtggcattgtcagcagtcgtacgtatgctgcatgagagattatcgactggtgccctgcggacgtactagccttacttagtaacttgtaccgcggacatgcccgcggacattccgcagcttcgaagtattaaagccacccatataggattatgataatcattccatcagcgttattaccaacaggaacacggattctaaaacaaatgtctgaacatcgtaaggtatgtttacattattatatcgattatccctttactaaccgtctcaggcgatcattatcggaggaggtcctgcgggtctctcgaccgcgttgcgtctccaccaaaccacaaacgtcaaatgcaccatctatgaactccgacctgagccaaccaccctcggaggtgcaatcggcatcatgcccaatggtctccaactattctcccgtctaggtgtctatgacgccctccacgcgcggggtagcagccagagtaacctcgtcatccactccgcacaaggcggaattgtaggcgaacagaaagatatggtcagctacgcgcgcgcacagacaggcttcggataccttcgaataaagcgaacagatcttgtagatgtcctcctggatgcggtgtacaaagcccaaatccccatctatttcaagaagcggctcacaaccattgacgacaacggcgactctggtgtgactatgacgttttccgacggtagtactgacacagcagacatactcatcggctgcgatgggattcactcttgtgtgcgtcgtctgtatgtcgatcccaatcagaggcctgaatactctgggttttcgggactattttcgcttgttcccacgtcgaggctgtcttcttctgctgcagcgcaggtttcaggaatcggtgcaacgttgacagagcaagggatgtttatggtgatgctcgcgacggcagcaggtgatgaggtgtcctggggtttgtcgcaggaggtcccgttgccggattccggggatagtcgagatgggtgggaggtgtatcgacagaaggagctgaatggatttaaatcaaacatgcatcagatcttggaaaaggtgcatggtgactggggggacttactaaaacaactcgttgagaacaccgacgttatgaagttctatccggtttaccgactgccacttggtggggcttggtataggggtcgctgtgtgcttcttggtgatgcggcgcatgcaatgcagccacacgcgggacagggcgtctctatggcgttggaagacacgtttctgcttgctcgcttactggaagaccacagtcgacctctgacggaggtgtacaagaaatatgaagagattaggagaccccgagtgaacgagatctacaagcttgcttcccgaaacgcgggggttcggaagacgactgggccctggggcttgtggtcgaaggaagttgtggttgggatggcattttgggcttcttgggcgttagggttggagaagtggggatggagacagaagcatatggcttacgatattgatatggaggaaatatagaggccgtaggtattcgttgctgatcttcatggccatatatttatttatcacttagagatattagattaccatttacttcccacttcgatagtcttaattcacgagcgatgtctcgctaatgcactgggttgagcccttagaaaagggtcatgtgcacatatccctagacagaagtagagataccaatgcattgagttctccccactgaaagggtttttcagagttcagaggaaagtctaccgctcgatagctaccaataatgctgaaacaaaaacacgactcccaggaggatccctgttgttgagtaatatacatcacgtcaggtatccagccaccaagaacctaaacaataatccagcgccatgtggcgtcaagcccacaacgctttctgagacctctctcacgctaattccgtgccacttcagcttccaacggcctgtgcacctgtgctaccggagaacctgcgatcgcgttttgttttcccccatggatacacgtcatctataatcgaccggagcttacgaacaaagttctggtaccagactccatccttaaagccgaacatcactctggaccaatcattagatcaatgggaaattgttggtataaaatggtacgcaagggagacaacgcacaacttgccatccatgcggcgaacacggtatacctcatagggaaaatcagggccgagcttgccagtgtacttttctgcctcgagatcaatcaccacatgtagctttgggtcgacttgcggtatatcagggttcgggggttggatgtggacgaaatgacggtcggtatcaagttcctcgattgagcgaccgttcttttcgaggtagagtcgaactggctcgtagagatctgcttcgtcgaggtccgcttcttgcaagcgtagaattactcgctttggatggtccatcttggtaaaatggagggatgtgaacaaaaagttgtacgatttgccggagggaagtcattgctcttatgttgtcggcgatcaatgtttgcttggtgggagatcagcacagaaagatcagcgaaattgatacgttagacagactcttttgattgggccaagtatacaatgagacaatcgtaggtagaaacatgaatatcactctgcatcccactctcattggttgctcttgtgtgaccaatccaaattatcccccgttcttgtcctctacgacgttcttactccttaatgctggagctcaaatgagggctacattccagaattgtcagtgctatatacctaggctatttcatatacttacgtgaaattcaaacgataaacataagctcagagccttccgaactcggcggcgtttcgcccctacaaacaggacatgggccatccaagtaatcattctctatatcgacgacacggtcaagatcacgcagtcggccacctggtggcaagcatagctgtcgattcgagcgccgaaaagcagcgctgcaacgctgatagtccctagccactgtgtggccgcaaccgtgacgaccgttatatcgctcgcagagtagttcacacatttcgagataggaacgatactaagtcgtcagatgaggatctttcactgctaatttaaggaaaaagacaagaagaacacgaaaaattcttaacacttaggtttcgagttgatattatatacattgggcaacgctccacactgtatatcgcaggcatagtccctgtgcacttgtgttgcaaggtgaccagcgtggtgttgtatatgtaacggtccgattgcattgacgtcgctccagttcgtttgtgagttaccctcccctggcacattcccggtgacatagagcttgcaggtcgcacctcagcggccaggacacctcgttggtcggcagggtttcatcatgtcgtagcttacacaagcgcaagccattgctaccagtcaacaccatcccccaaagacatagctttgtaacacagagtgtaaccaaccatggagaggtcgaccaggtcttcacgcatgcggcatggacaagttttaatcgtttggtagagcctagcttacagaacattgatagacgggacgggacgggacgggacggaacgatgagcttgtcccgtcatagttaacagtgattggtcactggctctcgagtgctgcagagtttcgtctacttgggaagtgtaagagcgaccctcaggtcaagcaggtataactgcaagtatgaggggaaagagaccacttgaaagcccgtctagtgcaaactcaaaaaccagatcagggtaaatcatttatcactttatgtgctttcaccgaagttgaagtccatatcatccaacagggagttccactgtgggatgtcgagctctggggcgaccgctagaaagtctgaccatagctggtcccagtcttcctcctgcatccctggctcaggtggaacgttcctgtaaggagccgcatcgtcaaccaggattggatgttccgtcgctggccattgcactgtacttatggcatgactagacatagatgtattataaagaccttgcgagttgtcattgttctgaggggcttcactaggcgagacaagggtatctttacgtattcccgtaatgtctgattgtaaatcaaggcgccgtggtcgctgtctgtggagagttgacataagagtctgcatatttttctggatcgtctctaccaggatactagactcttcctttgacttctcgagagtctcataagcagcaagcactttacccttccgagcctccgcatctggtgcgtcggggttaaatgaaacatcggtagctagaataagagcggccagaaaagcatgctggtttgtcgtccaaaagcgtcctggtttcaatccaatccgtgctcccgcatcgtccattaagcgtcgtaactctaatactttctgcgcatactggatacagacccggtgagaatatgagtactttgggtttgtcacaccttcaaggtggtagggtcggtggagccggcagaggcgcgtgtgtagactgaaatggagactgattcgctggaccgggatatagggacgctcttcacatattgtcttgctttgttcaatgctgtcggggtctagtttgaagaaggctggaagctcacttaggaagttctgaaacttcctgtctagcgctaggatggtttcgtaatccggctcttgtgcctccagccaaattgatggcatcgcatcaacgacttcgcgacaaagagtagcgagtttcacacggtagataaaagcggatagtgaggagggttgggataagggacggtcctgcagtatccctgttggcgtaataaactcgtcgtcagtattagtgggataattgaccatcatgtgctttggctggataaagtatgctccttcctggggaccgccagaaaacgagtttagcctttgctcgttagtgataggttgaactaaatgtatactagactcaccagtcgctcgccagcatgttccaccagatccgtctttggacttcgagctcaattgggttgtatcccttcaactctctttgttcgcggcttttcggggtatctaagcgatggatctgcattgctcgtgccatggagaagcaacggaagcggattaaaggaagtttgtaaggatagttatcagaattgccagccatatgtgacaaagtagccatagcggcgagcgcagtagtggagggctccatggggtgaggatgatccacgatcgatattgcgaggcgtgtgtataccttgaaagctgcttgtgcttctgttggcgtggcgttcagtttctccagcagctgcggtgtccaggcaagcattgagccagcaaatacactaagaagtaacagcaacctagcagtgcctatttcctggccctcaagcatagtctgatatgtcttctccactagctctcttgtagaaggaaagtggagcactccgaacatcggcccaatagttgctacgaaatggctgaacaactctctagcttcatctattcgtgggagatgcctggctatactggtagtattgaaataagcctcatcgtgagaggatcggacgtgtgaattgactggggtaaagcctatacgagagatttgttcctcctcctacggtgtcacagatgttacgatttgtttccctagctgtaacacgggaaagcacatacgatgtttgctgggtatgccgtaggtagatgtgcagcctcacttggcttgcggaagaccgcttcttctaacttttggaggcgatacagcacctcgtccgggtttcttccatgacatagtgagcgacaaatccgaccaggagaatacaacaaactcacagagaagtgggcactgagcgtgaggtccccggagcggccggcggacttggatccctccgaaattggttagtgtcagttgctattacggatccctggcccccagagaactggttatgttcattttgtccagaatatttgcactggatatgtctctgcgtgcaactggagcagggctggttgcgatcgcaccgacgttttttctcccggcaagatatgcacgacagaggtggtcggttccatcgatgtatcatcattacagggcttccactgtgattccgtttcatgatgcggcttctcagtgggtgatcgctggtggtggtaggaacatgagatggacgccagaagaggcgtgaaatccgcgggtcaatattaccgattgtggctagtggctccgcgacctccgagaacaggatcggaatattgtttgtccgattaaatacgtaactaagcgaaaaggcaggttgtagttagatattatgcagcttcaagttataatttgttataatttaacggaatcttatagcgaaagacggccctttggcccctggtgagaaacatcctggactgctgaatttgccttgccttcgtggctgcacgaggagatggataacagtgttcatgatttgtcatgggagaattctctataatgatatcagtctctcggtgtatctcaatgacataggttcctatgataccagagatagtaagatatggagtttcacgactgttccctcacctggcgatagcaacgatgacttgctaaacgcacatacttgtttctttggcctcttcagccttatcggagagccatgagagcaccagatagtgatagtcacacgacagagttcttcaataatacggtacgatctatggaacctggagacactttaaaagtgttgtttgataacccaaacccatgcgggaactccagctgcgttcctagataggacttggctcgtgggaaagccatgaccagatgaaaagcaacattagtggcggaattcatgccataattatcgtgtggaacgccggcagcaaccacattgaatcttttcatccggttataatattagcacctggaattatgtccatatttttgaggttaggatgaaaaagtatacgtgaataagaaaggtcagattctgcaatactataaaacaacaaatctataaaacccacccttccttcctcaccacctccctagtccactcctccaacctctttacaagcttccaatcattcgccatatcgctctgccacctcggctccccaaaccgtcggaaaatttcgagatacgtaccgctctgctcggccttcatatcctgactcgccacacagaacaaactggtccacgaccctttatccgcagaccacatcaacccaaacatgcgtaagaccgagaaaacacatgtcatgcccgaccccgagtcctccaccgaagtggccaagttcgtctcaaccagacctggatggacggacgaaacccagatctcgccctccccgttccgcgcactgggagagccggggccgtacgccttgtgtagagccttggcgtgcagaatgttggcgagcttgctttgtccgtaccgcgcccaagggccactatccttgagtgagaggtctttgaaattgatgccgcccttgggtgcgcccaaatggcctgatgaagtgaggttgacgatgcgcacgctgccaggataaagccccttggcggtcagcagcatcagaggaagaaagtgctccgtcaaaacccaatgcgccaggtagttagtctgccactgggcctcatggccatctttggtgatttcgaagggcgtcgccatgatgcctgcgttgttgaccaggccgtgtagggctgtttcgagggtgaggaaatgcttggcggccgcgacgacgctggtgaggtccatgaaatccatttgcaggaggttgatgttagctgaggggtgcatttccttgatgttggcgatggctgctgtgcccttctctagggatcgggcgcacaggtagacgtgggcgccgtgttctgctaggtgggttacggtgtagtagcctctgtgatttggtgggatcagcgattagggctttcgtggtgacaaggagaagggagactgacatgccggaattcccacctgtgactatgaatactttgcccttgagattagggagagtgtcgggatggaaagtcatattaaaaacgagtacttgagtcactaaatgtcttggattgaattctatgatttgatgatacgaaaacatgcgtcgaaatcaaggtgatgccacgatctttattgctcttcttgaacaaagtccgaggtaccatcttggatgttatttccaagcgtcagatatcgtgagcaaactgcatgaccattgggccaatcacgtcacaatagacttgtacatgttaaagagatagactaataggagacttccgagtaagcaagtgagccagctgcatgaagcgtgggcctcctgccgagtctaatctctagctacggtcaatcataacgttgcgtttgtcgatgtgagcaggttgcatgacactagacctgctcaagttagacactgcaacggtgaccaatggtcctgtctgagtcagctgcggtatagtatgcatatgacccaaggtagtcaatgccctgcgatctagactgtcagactcgtcatcattgtgagcaggctacataaactgtcttggccgacccgaagaaactcacgtcattcatcattgcaattcaaaacgtccgctagcatcatgattagtatgtatcagcccgcaaattcaacaacaccacgcatccaactcacgtcgatggcacaattggccgaggtacgtaccaggccgccttcaatcacccaagaagatctgacttgcttaccgtgtacaggcaattagcagggaagacgactggaccgggaccaaggatgccgcagcacgcagacgggcacagactaggctcaacacaagggcataccgtaagtaagatcttggtttctctttcgtccatatcaacagccaaagtagtccgatcttggggtatctaattatcataactaatcgtccagtaggtaaacgcaaagctcttgcaaagaacgccgaagcatttagtgccgaaaccgggacactgatcaaatcacgagcgccggtggaatgctgggacattgagcagcaatccatctccgtcgtcccagcatcacgtatcaagcaattatataatgcgagaaatcccttgctgccagataaacctggaaaagatcagtttaacatggtcttccccctctgtccagaccatctcatcacacttctccaattcaacgccctccgcgccctggccgtcaaccgcaatctaatctcgaatatcctcgtcacgccgctcgactgtaataaggaagttatccacatcaccccctaccctagtaagcccgacctactcccttcaacactcctgcccaccacccttcaacaaacggtgccgcacggcgactggatcgacctgttcccgtgtcccgagggacgagaccgcctgatcctggccactggcacctttgacgaggatgtgttgtgggccgactgcatcggcgggctatacgagggctttccagacgatgagattgagcgacgcggcattattgcgtggtcgccaccctgggacatcacggggtgggagatgtcggaaggtttcttaaagaaatggggatggttgttcgaagggttgccgggggtgttagaggcgacgaatcggtggcgaatggagaaaggagaggaaccatttgtccatgatgactgcacgacatatgtaactgcttgacctttgtttcgtccgactacttcttcttcatcagccagcggagtccattttccgtacatatcgctggacagcctgccgactatggtgttcattttctgtggagagaggagagaaaaggggatatctgacagttgacttatgacgcatgtccaagtatacgttgccattactcttggtgtgcccatatttaatactatccttgacatgaacttggcgggaaaacattcaagagacctatgtcttgaacggatcctcgcaccatatcagctgaatatgtattcctgtggaatctttctaatacggcaagccattacaggctggtgtctttctgcactactaggcacttttcctcatatattggcctactcagcgtgcagcatatttaggaatatgcactccggcgatggtatctaggagccagtcagatcgatgtaaccaccctaccagcacttgtctttctggaaatagggcgctcagtttgtttccaccgttgtttctcgttgttagtccatcattgttggttttcgatttctttttgatcgatcgcctaaccaatgcttccatttctatgtagctgccatagtttcaacgattgacagatcagagccattaaaggtcaacacgaagttccctgaagatcataaattggaaacatttggaagtgcgctctcttccggtcgctctggtggtactctcttgaacgaatcctccttttatacttgagtgttgacggtgtctggcttcgattataggagaattatgtcgtcctttttgtgagatagaccccttgttcacgcctttcgttgacttggagcaagaaagctgtttagacttcccgaggggcgggataactacaatttgagaattgatggtgaatgatggaggtgagtgactattgatcaagaccaggaaatgcttgaagaattcgagagagtgcaagagtctcccagaccttgaagtcacagtcgaactcacgcagcaacctgcgttcctcaagtacctacggggacacagtctgcacaacactgcctatcagatcagctggatctcgaaagtgcaagagctgctctttgcatgaacgagtcagaaggcaaatgtgaattcactcagtaggctctgtggttactacgttgcgtctgccttacaaaagtttggatatgtcttacaagtttccatttcccctcaacgagagttatttctacaggcaggtcacagattataggacgctaaggcaatttacagataccttctataccgcttcctaccatccctctcataaggtcactttagttgtgttcttttgctacctaggggagcccttcactctctcatggccttctatgctccccaagaataaagtacatcccatacaaaaaattaactgcatcaaataacactccactttgttaccattgccgccagataaacctacaagcgatgtcgtggaaccatggattatagacgtacacacgacccatgcaaatcagaagccttgaagtgtatcccagtcctactggaaacaatttatcagttattgctgctcattctccatttcctatcagcacctcacttaatcaacctcttcatgcaaggatgaaattaaagagtgggccatgataaagtggggaagatgggcttgagtatgaggaagcttccaatgactgaatttctattccgcatccagctttatgtgcggtctattaagtgctgaggtatatggttcttaagcggaggcaaaacttatatatatctgctttttgatctcggatatcttcatctacaacaactgctgtttatcacacctgtcttactttcctcttcacaatcccttgcacctggtacttaatactcggattgaatttccctccaccttttcaatccaaccgtaagcttgtttccatgaaacaatacgcctacaaagacatcggcgaagccaaccgaaaaacccactggtactcatccgccgtctgagccggagatcaggttcaccgcgcccgccaaggtaaatactcattacatccccatattcacctatctgtgtgaggtactaacaatggtacaggaggtttctatgatgcagacttcaacatcaccaagcttgcacctgaacgatcgaccaagccttcgtgaacatggataccgccctcaaggacacgggtgccaatggttgttgcccggtctacagaatcaactcttatcatatccaactggaccaggaggcgcaagacgccatggttcggaatgtcaagaggtgaatgcctgataaccaccccgtttggacatgtgtgcagattggtcgtcttggtcatgatgctatgagagttgagattgaggtttcggcgtttggtcctgagggtgctagggaggctggactagtccagcttgaggggtttgggtgggatgttgtgatagatgggctggtgaagtttaatgtattcattagcaggattggggtaggttaaggaaatatagattggggttttgtgacctatcgcccaatggacgtaagggatagcgcgcagattaccgtcaattactatcgtgcatcatagcttttcatactatagcttcttatttctgagggcaaaatttacgaacatattaatttagaccaagtttcctatttccctgacaatacacgaaatgatccatgatgacagcagtttcacctcctcatttagacgactcgatgaagatgatggccttcagttctcgtctcaagctctcacacccacggtacgagacaaaagcttgctgcttgatgttgccaggggtcaaaaaccggttctgcctctgtcccttggattgatctgctgacatggcccctttaatgacatccgcctcataataggccggagagaggtctgtatcggacaatgataggccaagccaccgcgcggtcaatcgtctccactcatcgcccgtgggttcccaacagttcagaggccgctcgtcaggtgtactaaagaccatgatggcaccggctctacctgcataatccttggctgtggccagatcccccgtggtatagatccctggcccaaactcgttgtccgcgttggttgaccttataacggggaggaagaaggccaagcatttctcgagagccaacagggtcagccctcgaaataacgtatcctttcgctgcagaaggccatccgcgaaacgagcagtcacatccttctcaaatttgttaaagtttcgattatgctggactcgcactaccttgattgtctcaccactagtcactggtcgtgagaaaggataaagggccttaagctcttgcgctgccaccgtctctgtaaccgaggcagggatcgagcattttttcactgcaccactctccagtccgggtacatggtcccagggaaagatgccttcatcctggtagcgcgagagaagaaaggagacggggaaacatccgattgggacagccacaatttcatcgtcaatgacataggctggatcgtcgatcatccgcaccacatcaggccgaccacacatgtggaagatcgtccgggatgatccgaccatctggtgaacgtgtgctaattagatatcagtaatcatccttggcaagaaagtttttctgcttgcataccgtattctaggttctccccaaggtactccgctatctcgagcggcatctcgtcccccgggtagtccccataccaaattgggtcaaaacgtacgtggtcataatcggtgttgtcgtacatcggctctcgctcatcatcgtcatccgttttctccccctctgcctctggctgttcttcttcttgaggcttctccttggcctctaggctcctgtcgacgtcactgggcatatcgggcgtggtgacagagtgctgcattttcagtcgttggatcactcggtcataggggaatacgttgggggggtgcgatttcctccaagggaaggggtcgcttcttaacgttgaccatcatcctgttgagtttgccggatatgagatagtgctgacgacctcgccggatatgagttagtgctcacgtactatggaggataatgaattggtaccaagtaatagtcaaattgaaaacccctgtattttgaatcggttgctcgttgttagcttaagaaagaacatgtagcggttcctgctagtagtttatatcttcgctacgcaccgcggcgctccttcccaagtagtccctattcccagaacatattattctatacgcgagaggcaatagcgggtgaaccataggcgctcaggcttgtagcctgatattcacaagttcatcgttctatgtgagtctgtactcaaagggaagcaaaaagaagacaatcgcaacgggtatctgcagaagatggtcaagcgtgatggctgagtgtatgtggagatatgcttgctaccgaacaaaggctgccatttttgtcttacctactctatcaacggccttcagcctaagaaagagtggtgtcataaagagtctctttgtcttttcctccgtttgtgatttcaaagatataactgcttccggccccttcgccattcaggcccatcctagacagttcagctagattcctttcgctaggaaagcttccattgatcactaaccctagaccctgttggggaagggatccgatggaatcaataccatctgctggaagctagcaactctgccactgcctttgtcagtaggcatgacagcgttaaactagcccatcgtggtggcttcatgaatatgacaaaggaaggtcgacccaatgatgctctggtgagtaaaagtctcactgacgtatagctcgtatttggtatagattctgcaagaaagcagcgctagtatcgtgtctgtctgataagactagacttcctttcattgagcccgtgttgtccccatccgtaaatgaaatggcagccctttatcgactgaatagagggcacggccgattgaaaactgttcatgtgtggaacatgctcagtagggctttgagggcagtgttgccagtgtatttgtgtataaccgaggaggactagtgtcgtcggtcgaatgtgtcttactccaatcgggtaagcacaatgttggttagttttcctgtcttgataatttcgtgatcacagccctaatgaagaattaatgagcgtattgtccttctcccagcaccgttcgagccccaggaaggggacgatctacggtcgcgacaatagtgcccccattgttcaattggtaccgcattcaaatgcattgagcttttttaattatatgtcttaacatgcatcgtgccttcagaagcagataatcggaaagaattatacacgaccaagaggagaactgggcgaaagttcaaattttaccgaccaccggtgacagtagatttcatccatcttaggtactcagcggcggccggactttacttgactgaacgcaatcggcaaagaagtcagcttgtgccagacctgattgcaagctgatgtgtcgtagctgcgctactatccattgtcgcgtgtcctctgagttggtgtgcatacaaccggccagcaagagcatccagctggcgaaatacgcaccaactcctgcgcctgtatacgtagagtgctcgaagccaggtgagctgttgaaagttgcccacgaatcatcagaccacttggtgcccggtaccgtcatttgattgaaatactgctccaggttcactggctccaactgcgcctgggcggggaaggggaagtagctcatctgctggggtacagaggccagaatgtcatcgcgaatttgcctcattgttcgactggtttcctgtagttgatcggtgtaatttttggagaagaaccaactggggtccgacttggctccccttaggagaagatggcagatggcgtggttggccaagacgcgacatgtacgcatatcgttccaaactccgacgattccagcatcgtgatagctatggtaagcgtcaccatgaacccgggtagggtccgggctagtgagctgcatgacagtgaactgccactctggtgagcattccgagaatcggctctcgagtcggtggtcaatatctagagcttgggataggtaccgctcgagctcgtcgataggcagctgtctttctgtggcgccagttccgttgctcacggcctcgctactatggataaaatcaaagcctccgggcaatatctgggaataaaggtccatgatttccacgagcccgctactggcaacccagtagggatcggaggcactgattgctttggcagcttcggcgcggatcatacggagtggtgaggggattgcactccccatgcgcaggcaattcatcagaagatggctgaagatgtccttgaagatctggaggccaatgggagtggtgaattgggccttgccccgcagccttagcagtgaggtcgcaccttggatatgttgatcccatccatttagtgaagactcaccgaattcatagagggataacaccaggacggtgacgattgtgctatgccggcgtgctgtctgcggatctgtcagggctttgttcattcgtttgatggttctcgtatacatggcccttgatctacatcgtagatcgacctgacaagttctatgggctaatccagcaaagcccacggctagaatggctccctgcaggatctcattctcatcgtctagtgtgagaatgctgggtacgtagtcgagaaagccaggtgagggcggagactgtcgcacgacgtaatgtgccagaaaatagttcaacccgatcatatcgagtggcagggcaaacggtgggggaatggccttctgattatcagggcctttcccctccgccctgtcttgctcgtcgttccctacattctcgctccctaactcgcaccgggacgaggatgtaccgcgctctagcgcgtttgaactcgcattattaaaatccggggaggtgttattcacttgcagggcatcattccccacgatgctctggctatggtcagtgaatacaggatcttcattcagtaaaccctgttctagttccacttgtaatcctgcaccctgcgacggacccaccgagcccggggtatgcccacgagaagcgtcacgcttggtgatccttgcgcgaactttatcaccaacctggctgctctcgtctcgaaagataagactcgtggggtctcgatagccaggacattgctgtcccatacgtcgacattgtccacatccgggaacagccttgtcgcactaccgttatccgagccagtgttagtgttacttaggccaccaaaaccaaggtgaaggggggaaattcaatgataaattgagttgatattgttaggaacgagggatcgacctactcgtctcttcttggctcggcagttgttgcagctagtggaagggcgtccacaatacaccatggttgcctgaaatcgcggggtaaaaaatggtcccaggagggcgagacagaaaagggaagcagttcgtcgtgcagcagtgattgtcgcaacaggctaggaatagcacctagtgaagcttgagcggaactcttgggatcctttgtcgtcctgtcattctacgtgctgacaccaagctttttccccaagacccgtcataaattagatcagcgagtgagaaccggtcggctaagcccgtcccgagacagtagatcgaagctcgattaatttcttttcttcttctttttttctacataagtacttagttctacccctgtcgttgattatcaggttattttcgtgcatgaatatgacctgattgaagaaaccagactttccctgtgaggagtttcaggataaatttgcacttttaaccagttccaaggacaagtgctccaccgcgtcaaaatagcgccagaacagaactgctctaagttaacgtcgctctcaacttaatgtcgcttcttgagttttcacctctatttagatattcggctaccatgaaccagtgatgaaatatacttgttccttgaagatcatcaaccatggagttggtcaacaaccttcagtacttcgccctggttgacaagattccctagaccactctcgtacgcctaattcccgaccgtgatcttacctcatttattcttctccgtcctaggctagagtataaatgtccaaacttaactatcttgtccaccgtcagtgagggcgtagggctggttacccaatgcggaacagaatgccgtgcaaggagtactagaccgtatgcagcttagtgcagtcgaagtgctacccgaaaaggtatgcatgatgctgccctatacggatctgacatcgaagtcaatagacgctaagctcagccacgtagtagcggacaaggcttatttttctcttgtagatggttgatagtatggctcaggatgactgcatagctgggcatgtggcattataaatatcaagaacgattcccagtcttcttgacatattatctataccacattatcgctatcattgtccaacatgcccggaaattcatactacaaaacctactctgagcgagattacatataccaagaagaggactacccctctccccaaatcccgacgaatttcggtcctctgccacttcctatcgttgttccacagcaacgacctggatccagggaacgcggtttcatcgccgcctatgccccatcactggaggcgtgcggcattgaccgcatggcgttcttaaggttcctagatgaatgcaacacagcagtacaaggaaacaagttcctagccggtgtacaagttgtctcgttcggtgtcggattcaccccggagatgatcgtgatgggagttgccaccgctgtacaggccggagcctacttcgccaataaaggccatgtcagacacaagtaagcaatccgtactattcaccatatctgcaactaatgcgatctccagaacaaatgctgtcctagatcgatacaatcaagaactattcggccctcgcggcctcttctgtatgatcatgagttatgagccagaagcctacgacgagttaaagtctcaatcgtcacaatcattatcgagccagttgagtaggttcggatccctggcctcgggtagctgggtacggaatcctgtctcgggaaagtcgcagggtgctcataatttacccactgctgtggcgcctttgatgtttatcgatgatcggcgtcagcataaggagctcctgtctgatggatgttccctggaatccacggaaaaggttaagtcatcgaagagggccaaaagggcattcgatacgttcaatgattacctagatcggagggcccgtgcgcaatatgtgagtcttgctgtctgctttctttctgctcgtcagcgatttgaaatggcggcgtgattggagaggacaattattaacagtatgtgtccagactgccgagaattcaggcgacattttgaatgtccctctgacgcgcggattcaaaaaccgctatctcgatcctaatcaccccgccaccaacgggggtctcatcggactactctccggtggcgtgctgactcctgatccggaggcacgcagacgcaaggccctgcggcgggtcgaagaagaagagaaacaagtactaggccagtattaccagcagatggacggcattcgcaaccagaaccagtcccgatgggagatcgagagacagatccggcagtgtgatgagcaatttgcgccacggttcgaggagttccgagagcggagacgagaagcacaaggaaaacagagaaatatccgtaaggtgagcaagccttttccacgtatatagataatgtgtgctgatgagattggatgtagaatgttttgtacttgaccattgttaataagccgacagagggagaattggcagcagcggcggcaagactaaatgctagtagtggatatggaaatggaatggtgggcgttacgcaggtatagatcaaaggtatgaagtatatatcacattcactcaatagtaatagtcttatcattctattcgtcaggcattataatgctcattaaatatgtacagagaagtagaaggtcatgagcacaacattcagagtctggaccatctgtccacagtccgagaagaagcccgagaggccctctgatatgctcgaatggacttagctggctggacgagaaaggacagtaacttcttaaataccacgcccttactgtctcgccaacctttctcatccatgtgggctgtcgtgcttgttatttccgatgaactatctgtcatgtccgattctgttgtcgatattgccaccttatcatagatcatgcccacccggtcctcgtccagataggtatcctctgatgagattgtatggagtagtaaggctcgactggtaagatatggaagaaatatagatgactcgaatgactgagatatgcgtgttactgcttcctcgatcaaacagggcgacggtggaaacgaggtgtcgttatattgaagcagggaatctcgctcctcagtcgacaaattaagctcgcgtgatgacccaggcaggatataaacagatattatctttctccaggtcaggagcagttgcggtgttaatgatggacgtgaggggcgacgtgagctattcaagccaagagcagagtggtatttttgtttgtatctcttaaggtcctccagaaattccaagggctcggaacaatggctttgtgatacgtaatctctgaaggattttaaagtatatggataaggtgcattgtcattcaacacattgtcgaaagttggtactgccttagggaagcacgcgatagccagagtcatccttgctggcatggaggtatatagatgtgtatatggatgaaggagatggtttgcaaggttgttagaggtaacaagtatatgattgacaggactctgcgccaacggcgtttttcacagtgatagacatcatgaaattgcctctcaaaccccttaatatgcacttcggtctcttctggccctatatcctaaagcctattttggagctaggtgccatcagtccctgaagaagagcaatgtgagtacggttggccacacgtcgaaccaaattctgaagataccggattgggaaagaggtcttataaattattatcagaacttctccatcagccaagcacgtcaggttcacccagacattatacgctatcggctacatccgattggttctacgtagcgagccgaacagttatatagatactttagctggattcagcatgtggaaccttaggttttgtgtgtgccgggatttaaaccgaagggtctcgccgggtccaatgtctgatgagggaaaatgattcgtgaaatagcttggctatctatgtacgactcgagtcatggggagtggcggttagtatgcggggtctggagcaaataccagacttgctgtggaactttgggtcgaaccgaacggctattgtagacaaccatggctcatgagttcgagaacgagcccaggaaataaatctatggcccagaccgtcgggcttgcgggggtaagatgaagaccagcgtatcttaaatcaagttagtgagcctcagggtttgtcgttgggttatggtcagcaggatagcattagcaatctacttgaactcaaaacagaagcgaaggagaagaggttttgctttgcatttccaatagttgctgatgtcagatacgaagttaaggtttggattttgctacattactcactgcaatatctgaaggtagcttccagcaaatcccgggacatggtcgtttgattcggtaggagtatggcgtgttcttagctggaagatattatcgctgcctgcttagctccagcccaatcgagcccatgttctagttctactgacctcgcgtctatatctgctttggtgtgacattcctcctccatgccttcagcagcaaatacccctgcaaccagttcgttacctcccacactctcgtggtccgaatcctaatctcgaagggcaaatcttatagcggtcaatgacactctccatcaccactgtttgctcgaagtaagtgatgttctagccattataccttccagaaatggtactaaatgctggacaacagtgttggatttctcatcggccttgaccaagccagcgaccgggttaaacttttccgcgcttagaaatactcgctcctcacgatgcacaacataagatgacaaaataccactgtatttccaggaacaaactttccgggtataagcgcctcttccgataggtgtacatctaggcaagctgaagccgatcggctgcgtaatgcggagattcttatctaaacaggcacgcaagtaaggagtgttattggctttctcatatggcgccatagtatttctggaagtaagctcagcattcacttcttccagtacagagtataaccattccgggctttttagttgccaagtcaaaacgttattcaaggcaatgtgggaaagtctgcatccaatatcacggtgagtatatcatttgtcttttcccatgctgaactgtccagttagctatttatgccatgcgttaaaggactaaaacgggtcttcactataacctccagagagatagctagaaaagccgtttctttacacaagcagagcaatatacttgacgtagattaaaatctttagcctccacggtgccaagtcaatttccaaggataagtcaccccagcttccccaaaaaagagatattggcgggttgcaccgccgcttatgacatgttccaagcccgataatccaagaggccctttgggccggctgctttaggacttcttcaacggtggcgggttgcaacatcggtcacacgccttgatacaactgagccaccttttccgccactttaaacccacccatcacatcttagaggcaagagcgatgaaaagcatctttcttttgtatggtcatgcttgtcatatcaatgacgttacccaggctgaattgtgacctgactgaggtttggcagaaggtattgccatatatctcttgcgttgccatggttcgccataggcaagattcaggcccaaggcggactataggatgtctcttacacacctcacttagcgtctttcggtgtattctaccgcgtcatgtatttatacattagccgagatcagagatgccttatgcagactgtaactcggtattgtcgtaagccttttgggccgcgattatagccaaggatgagttcagatccaacgtagaatatggtcgaactacatacaattatagcactgttcatacagaaggtagaaatctttctcatgtgggaggtcggtgccgtatcaatctcgtgatacaaataagactggacagaagaaattgtcgatatgaacatcataaataaattcaagatatcaggtctggcaatgtgtctaccactactcttcaccccccaagactaatctttccactaatcagttcctgtcggtaatcatagacagggctaacgccatattcttatttttacttacagggagtgtccaggtccacactatactattgaggtcaatgagtttcagtacattagttttaaagccgagctcctctttctagaggacatttgttacttttagctccaaaaggacatcgcacaccttcctccgtttctcaaggcggagaatctcctaccattttgattcacatttcaacacaggatcacgcattgcattgatcgggtgctcaccaaaagaaataatctccctttagaagaagtgtatctctttccctgtgtggaacatcgctggtagaagcacacgcctatcacttaaggcctccactgctgcgcgcaggtgaactggtacctttcttagagcgttgtccctcaaatatctgtttaggtgacttgcccaagtctcagacaacacgcctttagcgctccaccctatcattttgatcatctttcgcacattagacagatgcccgtaatcccgagatctcgggtttctggccaagtccacatcatcgtcacagctttcatcttcattctggtcactggtcacatctcccgaaagggaattgataatactttcacccagccagtccgtgtattttcctgctttcttgcttagtaggtagaatgacagaacatcgcacattatggatttctgctccagtaggaatgcatgccaatactccaccaagcccctttcgggaaacgcctcagtgaaatcaatctcatctgttggtatccgacgtgcgtagaactcagtgccggcaccgagctctagtcgacagagaaaccacttcgcacccggtgcacttgaaaatcgtgcaagtacccattcgccagcgacgatctgaatgttagattcggtgacaaaacccaacatgcgaaaaagctttcgctgttctggggaattaccatattgtatcttcatcgtcttcgggtttgtggtaaggtctgatctctctgtggaagatcgttctggttttttcaggccttgtcgtatgtcctcttcagaggtcgtataactttcggtgttagtctctgcattctgcctatactctgacctctgtagctgttcagagattccgtccaatttggcgtgtgggtctttaaggacggtctcctctaccacttcgactaaatccaactgctgcacaagaacgtgtctttcgcaagaaaaagccaccattgtcagcgccagccccgtactaatagtacaccatccatcaatcttctcattgacgctaattgcagtcttgatcttttgccgcagactatcaggatcaagcatccttacgacgatgcgctgaatgtcaaaaactcctttgattcctgagctgttcagcacaataggattcggactgatgattcttctgtccaggctttctaagggttcagtctcgttcaccgtaaccttatcttcagatctccctcctgtatgcactttatcgtacgggtcttggcagatgttgctctccgatcttttgcttaatgcttgctcaattgcgttcttcacctccttatcaaagtcgggcgatctatccaaccgtcgtttctccgcgccctccttctctctattctgcgcatccttctcctgtttgcgcctttctttttcgtcattacaccatcgtacattgacatgcagcgccagattcgaaagctgggttggtatacgccttccataccagcactgtttcttctcggtcccctgcacctctggtggatcattgttttctatcatctcctgacgtttttcgtcaggagcctgctggcccctactatcaccaggtatcagcggctgttgatggccgtcctcaagttcttcttctttagcatcgatctttgctgccttcatcttgtcgtagattggtttcaggtcaaagctatttcgaagcgtcctaaaatcatcctccttaaggagcttaacatggtcatagagcacccaaaggatgtctttgctttgttcgggttcttcacgtagatcgtggaaaattccaatatatcattaaacacggccagccatccacaagtcttttatgcgttgctcacgaaaatatcgcatcagctcttgatccgcgtcgaaattttcttgcaactctgtattctcaacccgaaacccactaatattagaagcatacagagaccggccccttatggggcttccattgtgtttcccggaccagttgaatacagagacgtcatttgaggcaattacgacttcatccatcgaacgagccaaagcttttgttagtccctctgctgggaatgccgggaatcgcacgccaagtatacccatcagcgagtaagctatatccgtcgggacagtacactctcgggcggacgccaggttcatcacactatgggcagaaaaggtcgctctcccagtccctctggaccagcttttgaggcactgtactttgctgaatcttgcaatatgttcgcgatcggcccggatctcgtggttcttcaatttcgccaaggcactcagaagcaggtcaatgacaatctttattcttctttccttgtagatatcatctgttttaggctgcgagtcactcaaggtaccgtggatggttccggctattagcgaatagagtttcaaagggtgtatgctggtatcgcctccatgctcaagtctgagacgttgaaggctcttaatagtgctccgaacgcactggccaatcctagccctcgcagtttcttcatccaggtttttggggacggcaaagttaaaagctcccagagtacctgtgattgactctaaaatatctcctgtttctgtctataaacccataagagatctccaacaggcatttcgaaggtgataaacttaccatgccagttctctcctgttgcctttttccattcaacaaatcttgcacatcctgggctggtaacgcagccattgcaatgctgatattttctttcgacgtggcatgttcttggtttcgagtgtacaggtcgatgaagggacaaagattgtagtattggcccaaatcatcgatcggtctctccaaaaggtcccagttagggttgacatagaaggtcactttgctaaggaccagttcctgcaattcgactaccagccaaattgtttgccggagattgacgctccgcgaccgcattcgaaatgggtaattcacctctgcatcttacctctcacatcctcagccacagtatgcatagttatgcacagttacgagtgagcggggagagaacgcgcggccgtgcggagataatccaaataatacaatgtgttaaaatggcataggtgtcctggcacagcatttctcacaatatacactatgttctcctatcatcgtgtcttagtagtcttcggaaggtctgtctgggataagagtctagtatgtgactggtatgtcttattctgtattgtagctattgagcgattttggaatgctgaatatatttgttcttatcgacagtgacatccatccatgggatatcgacatcaacaaagagcagtggcctggcaagattcgtctgatcgcctttgttgatgtcttcttcctcatttcttactcagctaatgctagcttcgagaagggcatcataatctatagtaagaatatcgttgctatctagacaataatttcccttgcttcactagctgacatctgtaagaggaccaccatgatatagatactcttctaggaaacgaccaacctcccgtcattaaaggtcgcgaatagccaaagactgcagatcatgatttgagtccagggcctcctggaaaggcccctcaggccaacgaggtacaatacgagtttcagtcggagaatgacagctcaccaactaagccggtgtcctcgagggtgaaacaggaaggtaagttcttcctatcccgctgtttctatgattctattttgaggagccaacatctccaccacttgttcccactctttatactcccctttccttttccttggttatatcatatcgtttctgatcaagacgtccaaaatatagtaaaaaaacgcttcaacttcgtcaacggtgcaaaatactccgtgaaaggctggggacaccagattggactcaaatacacatatccaagatcctgtcttcgggaatatgaaatcgagatcaacaagccttaccatcgggccatgagaagtatccacttcccactccctggcgattgacttactcgcactgacgcaaagtctcttatgtaggaagtatgaagcgtggtctcgaggagcatagcatactccagttactcggtgatgatatctggggcggcatcatcaagcagggacaagtgaccggacatcttgtttaaataccttgctaatggggtgttggacgatgcgctgaaggagtatgtggatggggtggtctctactgatcggcctggaggtatgattctgtctaatgataatgtgaggtagccgtggttaactgtccggcatttagctcggtttctttgggggatacatggtttcttggattcgggggattgtgttgtggtgcttaatattcgtagagcttataattttcgctcttttcggtcctggcctctggtgctgcaatcttttgtgttcctccttgtcaatatacatcgtggggtaagcgggaaacttggctacaagtatcaatcaagcctgccattattcagtaacggattcactttataatgataatttcttgtacatataaaaagaatgtccagtttcaacattccagcgctctttggggataaacgatcctataatatatccgcagattgactaccatgacaggtttgtctttacggttacactccaatagagtcgcacagaaattccaaatatctcacaggtgatgaacaagacacccggtcactttctcctcccttgacaagcctcgcgatcaccgagtatcatactccgcaaagccttcatctttgtggttcggacactgtccccgtgcgatcatttgcccgagatatacttccttggggtcccgacagggctggcccgtcgcagcgaagatagggcatcccatggtcacgaggatgcgcctcacctttgtgcaggaagtagggcatctggtgtagcgggttgttgtaatatgtattttgcatacctgcaagtccagttatcagactttgtagtagttttagttgatgggctgttagggacttactgtttgggccatgaagatagtcataatactttgtggatttggaaaatcatcacattcgactgcctgaaaattccttggtaccttaggcgtctctatagggtattttgaatggtatcttcaggttaacacatgtctttctggcctacattgtaagtctgtaggctgatatatttcagccttgagattaaaatgaaaaggtcatgtgccggactcacgtgtgtctctaaggtggttatggtgtgtgccttgtaacagatttcggaaaattgcactctcgaccaatcagtgatatgagatatacgttaggtccttgaatcaatctgacaatggggtgcctaataggatagaataaccaaagtgaaaccaactgcaccattctatatcaacatagggctcaaaataatataactggaataaggatgaactttgatttcggacgacccttaaaataacatcgcttgaaaataacctaaatcgatcacgatgtcgctttaaatacctcttagcactactccatatattcgcctgatatgtagatttatatcgttactagtgtactattcgagactagaatattataataggaaaaggaatttggttagtacttggatatcgcatttgatatacagttttgaagatcgtgactcattttgtaaaaggggattcccatccacttagcctgttaaaaacggatgtcggtccttattcttgctgtgtcgaatttaaagataggaataaaataaggagcacatttcaagccttgacaaaagctctcccagacgtcttggccattcgtgcaatggcaagtataatccctccggccagtgtcaaacacccgctaaagatccaggtcggattggcaccagaagcatccagaattgcaccagaaataggagtcccaaccagcaatgcaatgctcaagatagtaaagcacattcccatgcgagtacctatcacaccaacatgtggggaaaggcaaaccaagaccgggcctgttaacgaaacaaaggatcccgagaagcacccgtacagaacacaaaataccaacaaggccccctgggagtgcactgcgagtaggcaaagtatcagaccaccagatatgacagagaatggcactaagtcgttgaaagatcccacgatttgagaaaggtagcccggaaccagacgtccgagggttgatgatgcattgattattgggagcagatagaataccaggtcagtggagaccgtgtggttctgactagcaatagactggacgtagtacgggtgtgatgcctcataaagcagaggaacatccctatattgaataagtacttgatgcaaaggcgactgagagagttgacagtcctgaaagggctatgatgctgacctttctcaacgtaccatagttgcggccattcaaggcatcatgtgcgggccaggatacgatatatggattatccctagttccattccccagccactggtggtcgacatttccaacaattttcctagagttggtagtgcccagcaagaaaaagagccacatgcggtgccacataccgagactcttgtttcgggtttgcatctcgttctgtaaaacaccgatgcctcagtattcggtcatagggaaaggatggtggaagacgataattatataaagtatggttgctattcattttattcttgtggattcaatttcttccgatattattttgaaattttgattttcgatttttggtttctggtttctggtcaagggcataatctggcgaccagccaagagcactgcatcaaacgagtacctcataaatgagtttaccatcttctgctagtccagtaagcccggactggagtctgtctttcttaggccaattagggccctgcaagagctatagcgagcatcaggtacctacaaacctactccaactgttcaggttaggtccagcggggagcctataccactctaatctagacctaaaactaaactaggagaactaatactccataaggtttgattccttctaactaattgactatgtggcttaaatgctgggtatatgtcagctgcgtagggcaggcggccgtctagacccgtttgttggttgacagaaagcctacctagcagagcaaatcaagttcgtattactagcgcacctaagtatagtccactttacatatgactgtgctgcgatacaattccgtattagagatacaatatcgtcggctcaaaatagccacacatcatcgtccaaaaggtgtgttctagcactttggttgatctccttggttttttattccaaacacttacgttgtctgactgattgatagattctatttgagatggcacattgccattgtagactcgttcatgctttgaatgtcatgatagctgagaaacaatttcatgagctgacacttccgtctatcaaggtgttacaaatcgatacacagctgtagtaactcattttacaactgcagcacctcatttacacgtaccacctgcccggtgcgcatggactcattcgccgcaatgcccgtcgcaattgaccatgccccatcaagatgtgacgcagctctgttcagcggatctgaggatcgggtgccaaagagatcttgtagcaattgggggtcaccaccgccatgacccccttcgcccgttggaacctcgatttccacaggcttgcccaacaagggccgcaggagaatggtccgactctccagcgcgccctccaaggcttgctctcctccagagttcacatacgactgctccaccacctcaacctccagtctacccttgctcccattgaagttcacccggaacccttcccagggcgcatacgcagtgagactgtatgtcaacaccgctccggtctgataccgcaccatcacccccatggtatcctcaatattgatgccatctccaaacacactctgatcccgatagtacccatcctcccattcagcatccgcgtacagggccttaagctgctcattgctctccaagtccagagcaaaaggatcctccttcgccacatcactaccacgggcacgagagtaaaattttgtttcaccccgacgctcagcattctccttcccataaaatcgcaaatcacccatggcaaccaccgtctctggcttcgtccgcaaccagaagttaaccagatcaaagtgatgcgtagacttatgcaccaacaaccctccactgttccgcttatcccgatgccaacgacggaaatagtccgcaccatgcgaggtattcaacatccactcaaagtgcacggagttcacatctccgatcgcccccgagttcaacagctccgcgatcttggtattatgcggtgcataccgatagttaaaggtaactcgcacctgtccctgggtgcggtcaacggcatcgatgatctgtcgacaccgcggcgcatcaatcgtcattggtttctcggtgacgacattgcagccacgttctaaggcgcggatgatgtacttgtggtgcgtgcggtcgatggtggtcacgatgatttcgtccgggcgagtctcgtcgatcatgcggtcaaagtcctgggctagatatgtaggaacggcactgtggcctagtgcctcgatgcgactgtttgcgtaggccaggcgagtgttgttcgtgtcgcagaaagcgaccagctgggcggtgctgccgaagtcgcgcacgatggctgtatagaagaacatggcgcggccgccggttccgattaaggcatattttttcatcttggactctgccttggtcatggtgttgactgtatcggttacaacctggacgaagaaaatgtgtcaatgaactggaatctggaatcaaggatggtatagctgtttttaagtcctcggtttgcaatgccccgaggtgatcgatctacactccccgcacagacttcgatcaggctaaatacataatttttccatgaatcggaaatcagcacatgatgcggggaaatctggggtctggggtctggggtagagttccactggtcttttgatcagaaagcaggccggtcattgctgtcattgcgttgattgccatcaataactacctccttcgtatcgggatattataatccgaagccagaataaatgcactcttccccaggataatgtcattccccacaggtacatttactagtcatcatggcaggtccagcagaaacaccacatgacgatatcaccacggtcgaagacccccaagggcctcgtaaccagggcaaggaaaaggcagcgcggttccttgctgaggtcgacgagggtgaacggaccttcacgccagaagaagagaagggtgttcttaaacgaattgatcgccgtctgctacccctgcttctgggcgcgtacttcttccaacaactcgacaaatccacgctctcctatgtctccatttttgggctagttgaggacacgaatctccatggacagcagtactcatggctcggatcgattctttatttggcccagctggtcatgcaacctgtggcagcgctgctgcttgtcaagcttcccacaggaaaactgatcggaacggcgatattcttgtgggggagctctttggctatcatggccgcgtgtacggactttcctagtctgcttgggctgaggtttaccttgggggcgttcgaagcgatgataggtatgttgctaccgagcatggagtggtaacttgttgtctgggatcaggttctaacaagacacaacagcgccttcatgtgtggccgtaacgcagatgtggtggagacgaggcgaacagactctacggacggcctattggaatggaatgaacggcgtgacgttcgtcgtacgtttctgtccccatttcacagatcagtgaactatcactcacaaagaatttgacaggtcggaagtcttttcacatatggattgggtcatatccacagcaacacgctctattcctatcaggtaagcccgataccgtctacctagcatgaattatatcggctaaaccatgccagattatcttcatgttctgcggtctacttactgtcgccttttctctcgtcgtcctcatcttcatgccagactcacccatggaagccaagtgtctcaaccaccgtgaaaagatcatcgctgtagagcgcctccgcgcaaaccagatgggcgttgtctcccgcgaatggcgctgggaccacgtctgggagacgctctatgatatgaaaacctggtgttggtttttcctgatcgtggccatctcgtacgtgataatccttattgagtccatgcctagtcattaacaaagtaatgtcaaaactaacaccatccagaatcccaagtggtggtatcagcacattcggcaaccttatcatcaaatccttcggatacggttcattcgagaccattctcttcaacatcccctttggcgtaatccaggtcatcgccatcgtaggcggaggctggctggctacccggttccagcgcaagggactcgtcattgttgggttcgcaattgtgtctgctatcgggacattgttgatgattgttgtaccccgggagcagaagggggttcttcttttcgggtactatttggtaaatagacttctttcttcatcccggtcaatgtctctcgacatggctaatattagaataggtatccttcctggcaggtatcactcccctagtatatgcatgggaagcacaaaataccgccggagatacaaagcgaaaatgtacctccgcggttgtattgattggaatgtgcgccgggaatgtacgctccccttcattgccttctctttcatcgagaatcttcatactgatcatgcccaggtaatcggtccccaactatactcaacatcacaagcgccattgtaccgtccgggattgatctcgaacctgatcttattcatcattgtcggcgtgtttgctatgtaagtctctggtttagcgattacatgcaggacgcagaagcttactcttctagtctgacgaatctgtacctcatctacctgaatcggaagcatgctcagcggagactggatctcggcaaatcagcccaggtggtggacgaatctatgctgaggaaggagaaggtgggtaaggcggttgaactcgaggatgtcaatgctgttcctcagcagaaccaagctgaggataaggggttttcagacacaacggatctcaagaatgaggatttcatatatgtgtactagtcagttgaagtagtgtcttgtgcattgggctagtgttattgctaataatccatgttttatggtacaatctaccaacagcaaaaggtgataacacagaaaccgagtataaaagcctttgacagatgacgccaagcgaatgatagtactgcaaagctcatcgaaaataacccagctggcccgtaaaacacagattggatgcactccaaaacaaatgtagcgaaaggtaccaaattgagagatacaagcttttcactcagtgtctgaaatcaatcgagttgtcccagtgacacaggagaaactcattgccgcacttatttctcaggcgatgtaccaaacacctctaagaaaaactggcaagaatctcaaaaaggccaatcctccttgagttccttcccattcacaacaggcgcctgcgccgggatcatcattccgtagatgcgtgcccactggtcggttgtgttgctccagctatgcatcgtagctcgctgaacgaccatatcgccctcgttcaacgttacttgcgagccatcgtccaggctcaaaacaacgcttcctttgcccactatcacgtagtcgagcgtgatagagcgatggaacactccctctgcttttgggggaatatcataagcggagaccccagtgcctgtgggaggccaactccgcggtgatagtgctgcatcttcggagccattgacgtttgcgggatgctcgctcgttgaccacagtatcgtcaagttgttacctcccacaggctggggggtaaggtgggagtcgaaggctactgttgcctggccgttagggttgtggccagtcacgactcggcggggaggcggtagggatggtgctgtagagtcagacatatttttataatatggaaatagttatgaacgatgatacttggttctatggtagtagcacgggttttggttgacttcttaactgcgaagaggcgaattttaaatccggtgtaaagtccgacagctgcaaattgctgaccattttaattgctatcgacccacaacctcaatttttcatatatacagggtttcggaagtatgtctccctggtggagcatggttgtatatctatctcggtcatatccagagaaggtctgcatactggtttaattaacggaattaaagatttgcccggagttatgcgggagaaccatcgggggtatataaggggattgcccatttgtactcactattgttgttagagatattcgattaatctatactcgtgtacgaagacctcattgttattaacaacagtgcaatggcatccaccaatgttaatatcatctttggggccatgaccgtcggccaagcaggtacgttatcacgcccgtgcatcaaccgaatgactgaatattagcggtgtattagggctagatggctgccgacaaaccacgcctgaagaagttaaagacgttctagatgtcttccaacgacatggacacagcgacatcgacacttcccgcgcctacggcaacggcacctctgaatctctcctcggggaaagtcgttggcaggagaggaacttacgcatacacacgaaagtatatccaacagcaaactacggggcaattcccgatgcttacacgctcggagctgaagatctgcgacgagcactcaaccgaagtcttgaagcgctaaagacggacagtgtggacctctggtaccttcacgcgccggaccgcaacacaccgctcgaagtctcaatgcaagaggtggacaaattacatcgtgaaggaaaattcaaacgtcttggaatcagtaatttcatgtcctgggaagtcgcccagatgtgtgaaatttgcggccgtcatggttggattcgtccctcagtctaccaaggcatctacaacccccttcaccgagcgattgaggctgagttgcttccctgccttcgtcattacaatattgctctatatggctttcaacccttggcaggtggcctacttaccggtcgttacaatcttgagacgacctcctttgacgccggtgcacggtacgatcccaacaataagcaaagctctacgatgaatgaccgctactggaacaagacgacattcgcggcactagagattattcaagcagctgctcaaaaacatggtctcaccgttgctgagtgcgcttaccgttggctggtacaccactctgtcttggataaaaagcacggcgatgccttgatcatcggagcgagcagtgtcaagcaattagaaggtaatttggctgattcagagaaaggacctcttcctgaggatgtagtgcaagcgatggagcaggcatggcagctcatacaggagccgatccgaaaatactggcattagaatgagttaatcctgttcctctggggacccaaaagtcatatgaggaagtttatctatatggagtgcatataggctatacttttatattattagtaataaaaatacaatttaccacaaagaaaccctcccaattcccgtacccttcaattataagattaaatgacgagaacccatgtcagcgatgtctcagaactatccgggatgaacagtcatctcaacagatcattactcattacctcatccattgtgccttgggtcaggcaagctggcattctatgcctagcgggctacaaccgaaataaatccttgccactatttcccaggccctgccgttgcatgacacaggagataaacacaatgcaacctcggttggcaccaggcactttggctgtaagacttcttcttggttaggtgaacgagggatcaactgccgtagagttaacatcattccggagaaatccaaagcatgtgaagatatacggtaagacattatattggaagcgtttcaatctatcgccagatgcggaagctatatggagttggcgtctgcacgtcggcctacatgccttaaaagtgctgagccatattgaaattaatctagcactgctcctacaagggagcactgctgcgtatgtcagaaatgaaccgacgacaatcctgcagatcataagagtgtttcttgtttgccagatatttcgcctgcgtaaacgctgcctttttcagtatagaatacggacgcccgccatgataggaaaagaatacggatacgatagacctccttagccacatacagcaatgatcgaccactcagaacccggggtagccgaactcatctgctatctttatacttagatcctagagaagaggtttccactgtggatcagacccctgttgagcggaagaagtggtaaccgatcgtttccacatcgcagattataaaaatggaggtcagctcttcctccactttggtgttcaacatccatcgcatcgtccaaaatgcatgttgtcgcaagtaccactgcttttctgggcgtcgtttctactgttgctggggtacaccatgtcaacagagacaccagtcaacagatcctaaaaccacccgtaccagagcctattgtcgtcaccgagcttcccttgcctcctgtcgccgacagtaaggagggctcttgtactcccgaaattagccctcacaggaccggttgtctactcaaatcctcccagattcagagtggaaatttccttcctgacaacaatcatgtccttgtcagcttaaacttctcaggggctccagcagctccagatccggctagcatttataatggtacccatttgactctgataaaggctgatgggaccaactttcctagtggtgacccatggaagtgtattacctgcggcgtgccggaagaaaacaaggtcggcagcacagaactttcgccatatcctcaggcgtttttggatggcaagagggccttgattgggaccaacatcgttgattgtggctcggcgctgctttcaagttcagactgtacaccggataaagtgcatatctacccaatccgctggaatgtcaaggcagatggctcaggttccggagggaatatacgagaattgcgcctacatccggacaatgtgcacttagggttcaactccttcacgttctctaatggtcaactaggacagtttggctactttagtcgactgcagtttaacccagccccgaagactggcgaacctcgctcagcccgatatgatctggttaacgttaccagactctataacccggacagcccacagcctatcagcgcaaaaggcaacgagttattgtttaaccgatcggctattgccgtcggtgagcttcgaggatttaccggacgtggcaaagaagtcacatatatcggcaaccctgtcgagtcatgcaacatcgacgtattcgctgccgacctgacaaccggaaaggtccgtcggattacagatcaccccgagtatgtcgatccgatggatgtctctcccgacgacaagtggcaagttatcctcgatacccgagggaccggtcgacagatgttcatggccggcatgcgcggtattccaccgatcatcgacctgatagctactacggtcgcatcctctactcgcaacaacggccctcggcgatttttccgaccttggctcctggaccacgatggggaccgtggagactactatggccagcaaatcaacggggacggtgacggcagcccgggaagcatcaacgaccctaactggaacgccggggcagatccaaagtggtcccacgacggcacgcgcatagcatacttcgagaacctggttgtttctccttcttgtggcggacagaacccgctgccttgccctaactccactgaaccaggtggtcgtgtcacccgcctgatgcttgctcacctgaccagccgcgagccgctcgatcttgaacccgttgctcctgtctctgatgaagttccctggggtgttccatacgtgcccgagagtgctctaccagaccgtccctttccagctgaaggaaattacaccttgaagggagaggtgtcaggctcagcttctgtgtcaatcattcatgacaagaccattccagcagcgatcaaaactatcgcagtcacctatcgcaactattccgatgatgggttgcatgttatcgcagggtctgaaagattcaccaatactgtcgcatccatgacaataaacaaggtcgactggttttccgaccttacgtctaccggacaagtgaccggaagcaagaagaccagtcccggtgggttccatctggagattgatgctatgactaacatcttcatggcaaacggaaccttgacaaccactatcgatggaaaggtctggaagcagccggcaaatgggacttggtcactggtcatgttctatcaatcacagtgattgcgtctgatgactatgggaaatcgtcctgcctcgagtcaaggggacttgctgtgataccagcgcttgtatataactagttgaggcagctttgcctgtacatattctgtatgaaggacatgggaaacacaggatggtcaattaccagttatttaccacgatgcacttatgatctcccaccatccctactactactataagaaaatcgaggtacaaaaatgtatccatgtcaattactcaatttccccacaaagcttttccagttgcttgcttccatggttcactttctgcaagaacgtttggagccattggcatatcagaaacggaacaataaatctataatcttacgagtcatatgcatagcaggccgctacagagtacatttccatataacttccccatacttctcacaaaagaggtgattcccctaagatttcaccagtagcccacgcaaacaagtactccaaccaagaataatctcgcatcttaatccctacacacaaacatgcttctagaactatgcccgcctcgtcaatattcctacaataggtaagaccgacgtcccgtatagcgcgctcgcacggtgccactacgtataccccataacgccttggaaaatccacgtcccacttataatggagagaaagttctacacaatattccaaataggcaacccgacaacactcgaatccgtctagtgcgaaatgaatccttggatgtgcactaccaacactttcaatagatcctgcttgttccaggctccatggttcaagtcttcaagctccacttttgcttccgattcccacgtgcggatctactcggaggaaaatgtcatgcagaaggttcctgattaagttggcttggtatgttcttttatgctgtgcttttacattattgatgacttttggttgcgtgggctacttgttctatgttgggtgcgaaattatgtacgattgtcggtatgaagataagggcatctatgcatagaattgattcaaaagaagagggcaaaacaggtgaggcttacatcaaacatgaagggcatgaagggacttagggttgtgttggagtatccgaaagaacacacacgtttctctaccgtgtttttattacgtgttggctcctcataacagccggaatgatagttagtggaggggcaaaaaaatcgataaacacgaagaggcgtcgagagaggcgtcgagagaaagcgcgagatccacaccaacagatccatatcgccacgagggagttggcgctagaaaccacaaaaaagaatgagaagcgcgcctgtagaaaatatttgctaatgatggcactgccgaaaaaaccaaccagtggctagcgaacggcttttcttctccgagggtgggacccgatggccaagcactataattcattagatcaaggcccagtttatcgctaccacgtggctgagacaatcgattagccgatgtcaaaaagtttctgtgggactcccttgggtaaagcagaatggagaatcggaggaaaagaacggtaggattcgaaatcgaactagggttaaggaggccaaacgtggatttcttcttccggacgggtcccgaaagcataaaataaaattaagagtctagtttaaatagccgcggattttcttcatccccttatttctcctcttcggttcaccatatactcctttcttgaagggatttcaccatgggcgtcatctgggatcttcttgagcgggcagcctgccttgctgtcactgctgtcgctcttttggagggccgcgctggtgccactttccaaggcacgccctcggtcttgaccgagcaaggtcttgtcaagggatttgtggagaacggcaccaatgttttcctgggaatcccttttgcgcagtcgactgctggtgagaatcggtggaaggctcctcagagcttgggcaagtccgccacggctgaattcgatgcgacctcctatggcccttcctgtgcgcaggctatgtccggcagcgccatcgttgctcagggcgaggactgcttgaacctgaatgtattttatcctgtatttatattgtttgctactattgaatactgaccaaatcgttttctacagatctggacccctcagaatggctctaaccttcccgtgagttcctcatattttcaccgggacttctatagaggattggctaacaaatgcacaggtctttgtctacatctatggcggtgcaatggttactggtggcaacagcaatgctcagtggcaaggatacaacttcgctcgcaaggatgtgatctacgtgaacgttaactaccgtgagagcatttatgcttctccctacgctcccgagctcgaaggccaatcgcagaactttggcattctcgatgtcgagatggccttgcagtgggtttacgacaacatcagaggtatgtagaaagcattcttgtcccttggttatgcgttaacatcattgcaggatttggtggcgataagacccgcattgttttaggtggtcactcctccggcgctgttcatgtaagtaattcacaaatccttcggttccaatggccattcgacgcggaagattgtcccggtggctaatttgatcgcgatgtaggttgatcattacttgtggaatcatcccgagacattcctggcgggtgcgatcgaaatgtccgccaatgccgagtcggggcccgccatcgcccctgccggcgtcgccttgactcaagtggctcaggacattgaagccgccggtgttacactcagctgtgactccagcaaccctaccctggattgtcttcgtgaagtggatgtgtactcgatccagacgtcctacttcaattcgacctccaacacctggttctctccgatcgtggacaacatcacccgcttctctgactacaagtcgcgcttcgcggctggcaactaccccaagtcgcttcccttgatcgtcggcaactccgaccaggagggcaagctcttcggtatggtttactccagtgagaacaccaatttctcccaatggattaacaccttcgatgccgacatggctcacgtgcctgatgacgagctcctggccgcctacaacgcctcggactatgaaacggtgtccctcatgagcggtgcctcgtacggagacgctcgattcttctgtcccactgactacttgatcgacgtccgtgcgaacgagcagcctacctgggtgtaccgttggttcggtgactacgacaacgtcattggcatcccaggaatcggcgcatcgcacggaagcgaagtgccattcttccacggaggcaatgagtgtttctcgaaactgaccgacgttacagaggcggagcaggcgttggctgattacatgaataactggtttgttgcctggatcaagaaccccagcgctggaccgggctgggaccaagccaagcccaccaacggacccttggcgaagctcggagttcctggcaacgagctggccattgaaatcggaagtaccggcgattacaacgcccggtgccagtccgtgttcaatcccaacatccccaagtaccccgtggtccagaacccggtcaccctggccgagtcctcctaaatttcttatcatcggcaattagacattagcataaagcattaatagacatatacccatttcacaggtttaattaattgtcaataataaattaaaacatcagtactatcggtatttgcgcgtcttactccatatcaaatttcccacgcaggtggataccaatacgaaggattgcctgatcctcaggcagaccagaggaccagaccttttctacattcacgctaagaaaaatcgtgcatgaagaatctcgtgtagaaggatcgattcaggtacagcgccacgtgttccactttaggaatggatcttcacctcgagctagcgatcaattggacgttagatggtggggcaaaggaccaatcgctccagaatcacggacgattcgttattgaaaacattttttggtcgtcggtagggtagcacccctagctaaccctaactttgttcaaagttcaaccaccttgttcccgtgtatatatttggaaatagcttcaagaaatcctttacaatgtagcatagagaccttaactaaaactataaattggattactcggcggcagactcggaaaggatccgggtaggaaaagaaaaacctagcaggttaacgggacagttgtactccgtaccagaagtcattatgccgaagttttcccatttattcttgactgcctagtctctgtcttggggcctcggcatatggaatttctagaatagcgctccatccagatcgatcgttgtccctgcattggtgtgttgaactcgcttgatctaactgttttcgtgttttctcctgtctctagattgcctcctttctgttggtttctagtgtcggtcgcctcttcctatatcgtaaatatctccatgtcgcactatcgtgtatacatagcccggttgggacctattagatttatcccatgagctaatatttgactctcatgatgcagatctgtgcagggcaagaagtgtatttgtaagactcagacatagagaatagtgtcgttggctggtttgtaaggcgccgagaaaagggaaattaaatgcgttccgaaatcacagcacatctcggaggctatgtaacctcgcgtctcaggttggagatttggagtagggtagtgatttcatgatccaagccctatgcttccggcactgtccgcatccggtaaaccagacatactttgagtggaaacatctccactccatccagcctcccgagatgtcggaaccgtggaagtttaagcagactattaggcccttccaagcatgccactcgctcgtggaaaatacatccccatgcctgcccaatagcgccggcgattccctagcaggctccagcactgtctaggaataagcttcgccatcgttagatttctctatcgacccatgctatctggaccagtgggagagaggaatcgattccctgtccgcaggcaagattccacaacctgtaatggaggtcgcaaaaacaggtccatattatcaaggttggcattgttaaaatttctgtctttcgcacactaaccttacaattgaaggtcccttcgctcccttttgccgcccaaacggtattcactcgttccggctgtttaaatggcagtcggtccctcgttcgctcgttcataacggtgggaacgactgcagatcgtccccatggctcacccgggagtcggacaggtggtatgtgcttttttatttccctcttccgcaattgatcggcacgggcaaccggtgaactgacgatcactttgtcgcgtatattataggtcggatggtacatctgtacggttgtcgcttgtgcttttttcgttacacgattagttgtgcgatggcggaggttcagcaagttttacgtcgacgactacctcgtcgcggcggcctgtctgtgtttgatcggtgatctgatcattcagcatttcatgttcaattggggtaagttgtggttgcgctgggagatgcatggcaagggttctgatagttctttgctgtttaggcatgacggacatggccaatgcgtcaaagtcggatatggtcaatatgatgaaggttagtgcagcttggataacggatttgtcgcatcgcacgctgaccgttggttatagatgatcattccagggtctactctttatgtgacttctctgtggttgatcaaggctggcatggttcgtaccctttcgcattcttgaccagatggagaaaagggctgttgactaactagttgtgcatgcaggtttgcttctacaaacgtctggcggatcgaacccactaccaacgaatctacaatgttgtcctcgccttgcttgccgctacgtggctcactatcttcctcaacatcatcttcaagtgctttcctgtcgaccgcatttgggatatggataacccggaccgtgcgcttttcccaatatgaacaccggtagatgggcgcaagctaacaatacacaggggcatgttccaataaacagacccgggtcaattactggatcaccattttgtgtacgttgtcgcagcctacacactctttcacataagaaaccctcactaacgtcaattccaccaacaacagtcaacatcttcagtgatgtaatcagtgagttacccatgaccaaccatgcaaccctacaataaactaacaaccacgccagtcatctgtctcccaatctcccaagtcctccgaatccgcatgcctttcaaacaaaagctcggtgttatgtccatcttcctcttgggtatcctcgtcgtcatcacaagcagtacgtccttccctccccaaactccccttccaaccccaactcaaagaactcaaccccgaactaaccaactcaaaaaaaaacagtaatccgcgcaatcttcgcctggcaaaacaaacaaatgataacctgcacggtctcaatgatcgaaaccgcaatcgccataatcgccaactccctccccgtcctccggacccttttttttggttcgaagtctcgcagcgggacctactacaacaacagcagccgagcatacgagctctcccactccaacggtccagcgaaacagggacccctgaataaggtgacggcgtcggtggcctcgaacgtcgttacggatggccatggtacgccgacggggctgtcgagacatgattctgaggatgagttggtcaaggatgcggcttgtccgccggtggatgatcatgcggggatttcggttacgacggagtatcatgtttttcatgggaggtattctagtcctagtgttaatgggaggtagtgagccttttttttcttgggtgttgctgtgttgctgtggcaggggggttgtaggggttgtatgggtggtagtaatttatatgagtttatgtatatgtctgtatatgtgtgctatgaggttaatgtaattatgtatgaatggatggatactatcagggataaagtgtccaaggcgcgactcagcagccatatggttttggtcgactggtagcgacagatactgattgtcaggtttagtgtctgtgaaggtcctgccatgtatcggggcatcaatgtctagtatgtcaggatatgtctgtagaaacctcccattatcaaattgcgttgtaccagcttaacagccatcgcttaagcattgaataacaatgatgctacaaacgaggatgatgcatggcaaggacggtggcaccaagccgaccagtaacttagcttctctcggacagacgcagctatggtatgtataatgacactacggcatatccaaacctttaataatggttgttatcatctttatcttgctgcaagattgtcgacaagttcagatgtatacatcgaagacgcttccttaccgccttctgcactcagataacttagtggttgccggcagttcttgggtctagtcccagaggggtaaaccgatgtaaggcggtaagttacacagtaccaatatgaacctagattttgaatcctaaattaaatggagagacaagcatgagggatggaaatttattatttaaaaaaaaattgtaaataaagaaggggaaccgaggtggaaataacaaattgtaaagcaagacgatgaagagacaggagatgtttaagaaaagaaagttgggtagtaattgcaatctatgaaccaaaatatactgtggcgatatatattatccgaccgcggagttagaaggtatcgatgagttctgaaccgaggaggaggagtgctttatattgaaccatctactgaaaattaaggtacaagaagaaatagaaaatagagaaattgataaaaaagaaggaacaagaagcagattgcaagaaaaatataagaaaaagtggtgaaagcaaaagaaacaaaaagatggtggaagaaaaaaggaaagccgagcgacgcagggatcgaacctgcaatctctagagccgaaatctagcgccttaccattaggccagccgcccagttgctgtgatgaagagtttccaaatataaataatatattaagctttataaatggtatgtgaagttcctggactaacctaatgacattaccaatgtttatcttattattctggacacaacctgtctttatatgaataaaccagttattgaacaacaaattatagccttaccatgctttatcacgtcatgtaggtatgggtccagccctgattatagatctgtactgttaaccgaccacccattgatgatggtatacgcatctattggcgtcgtgccatgcaacacatcataatgggtgcgatctccgcagatagcttcgtcatgagtattcgagcatttatcctgcaacatcgcagcgatttgctcgcccgcctcgaggccctcaaaccacgcaccgtgcaaaaatccgaaataaggtgcgctggttgcctctccggcgaaccacagccggtctacgttggcgcgtagattctggtgcatttctaacgtggttcccacgggccagttggagtagctgccgtacgcccatggctcgttgttccatcgaggatatatgaatgcggtgggctcgggtatttgtttatcgggaaacatctcgcggaggacagcgagaacttcgtctttggtttgctcgttggactgtctctctactcgatatgcctgctcttctacgacagtaacgaacaggatgttagactcaggcatgaagccgtctttcgaaagcgattggaatatcgggtagtacccgcgtgtggtaggcgacgcatataagaaaaattgcgtatcggtcggccagaatgcctcatcaaactgcagaaagatcttggtgtatgtccccatgctgaatttctgaatagcagtttgtttccatttgggcaaagccgggtggaactgtacgacgtcgttctgcagtacgcctagagaaaacgtgcaaatggcatatgctgcgctgacacagctgccatcgctgttggtgattttgacaccttttttagagtattcaataccggtcacttgggtgttgagccagagccgacggtcttggacctctttatggaggaaggtcgacgcctcgcgttcgatgatggtactatatccgcgaggatccacgaccatgtggttattttcaccaaactggttgaacgtgagattctcggcggctactccgaaaatgaatgagctggcgtcggggctggctgcgcattcgcagtctgtcaattattggttagtcagggtttgctgcgaagtcttgtcctcccatgcgcttcgtaccccaattccaccattccactgcttgtgccttcatatcgttctgtgggggattccagcccgccatggcaaatcctgtacgcgcattattatcttgaatattgtctaataacatctgtcccgcgtctctgtaggccacatctttcacgtcgctgaaagtgtttaacagatcttggtagtcattgtagccggtctcgtcatatgtcaggacggagctggaattgtccggtgtgtttttgagtccgtgcttattggcctgtcaagataggattctgtcagttatatattgaaagcgaggagaaatgctgtcccgtactagtgttacgagtgggttttcttcctgaagttagtaaagaccaaacacatagaatatgggcgcttacctgccctacttgtcccaactccatgtaactgcgcttatagcttagcaagcctatcttctagcttctgatagactgtatgtatggagtcatacccaattcgcaccaaattctatcacgtagggcttcccattcttgtcctgaccaaagtccgtactccatacgcgcccgccaatagtatttcgatactcgagaatgagaaagtcgtgaatcgatgcgtttgacaaagcttgctagtcacataaatccatgaataattatcctatttttcctttctggggcttgacagcctcgatgataccacttactgctgccgtgataccggccatcccgcctcctctgggttacgttagacccctgcgacaccacaaaaaggttattattatcttacaagatcgccactgtggtttccgtgcatatcctttccccgggtggaggttgtgcgacatgagcgaaggccgactttatggttccggtgaccagtaagagactcgaacatattgaaaacgtgaaatgcatcttgtctaaagcttacacgatgtttggttctaaacggaatacaggagcgctacgcagagcttttgtattcactactgggctgcactgggcaagtcatatctggtacatgaccttcgcttggcgttcagtgactggtacaatgggttatctctgcaccagctcaccagatcgccagtgaggcgatttgcagcggccagtgatcagcaggacagtcttggcatgctaatcggactagttagtagacgtttgggctggtggtcaggaagtttagcacgagatgggtaagtccaggcggatcgaacctcttgtcatgtgggagggttgataagcatttggcgtggccagttaggatgcttaaatagtgggttaattagtttaataagagctaactctttgctttgatccataaccccttggatggggcccaccttaagtgctagctggcaaatcagatacatcgctgcagcgagatgactcgtcctttatcaggaccaaattaaatcaatcaagtcggcaagccctagcttaacttccccgcatccgaggttggacattccgtttccatcttggcttctcaataaaccaaggaacaataattagatattaatactgtcaattctgcaagtatggatccaccacactttctcccaaacatactttcatcgaccgccatggaggaatcaaaggttgaatacgtaccggaagacgatgcgcagctggctcgtatgggccataagccggaattgcatcggaacttttccaccctgtaagctgacccaaggatctggcttatcggctaaaatgctgattcgtgtttagttctatgcttggtttggctttcgcggtgcttaatgtaaatgttaaagccacccggattaagtcctcactaacgaactatagtcttggacggccctctctgcgagtttatccataagtttgacatcgggtggtagtactagtgtaatttggggtgagtatctcaatccaacactgtcgaatatcgcttacggttgtaggtctggtaacagctggcacttgcaatctgtgcatcgcagcatccctggctgaatttctctcggcattcccaacgtgagtttcttggcaatcaaagaagcaaaaagaacaaacgaagaaatacgagggagaaccgggggcttacctgcgagtgtatctgtagggcgggtggacaatatcattgggtagctggtgagtagtctatcccttgcatacgatcgtctcactaatgtcgtcagttggtatgttggcccaatgcattaggtttccgcatgttaaacaagacagtatcttggccgcaatgggttccgatcttgtcttggattaccggctgggttaatgtcgcgggttgggtaagtgccccggtggaaatcaggctaggagcgaagttgactctataggttgcgctggtggccaccaactcccttctttcaagccagttgattgcgggagtagtctccgcggtatatccggtaggtttccttttctttgttacatatttcacactgaatgtggctaggactttgaatggcagcgatggcagcagtttctcatttacgtgggtatcacattgggcgcgttcgtgattaacgcgttcatgaattctgtgctaccactcatctaccgtggcgcttgtatgtatgccctgaaactgtatacgctcggttctaaatgtggtagttacttggtcgattggcggctttgttctggtttctatcactgtgctggcgtgcgcttctccagactataactctgcctagtgagtatcctctcagactgagatgcattagctaatgagatagcttcgtattctgcgactttgtgaaccaaactggctgtgagtttgcaacacctgagagacagaatgtcgctaatgattaatagggcctgatggcgtggcatggttactgggggtttgtctccatccagactcatttgagaacgaaacatactaattctttagctcctacaaggaggattgggtgtcactgcattcgtatgtcgaatctaactggtaatccatcataatgctaatcattccaggatgctgtggtccacatgatcgaaggtcagcaaatccgacacacatcacgagaccagactaaccctcattgaaacacagaaatcccgaatccatccgtcaaaggacccaaagtcatgttaacctgtgtcggaattggtaccttcaccggctccgtctttctgatcgtcctgctcttcgtcgcaggcgacatcaccgacgtggtgagctcaaaagcagggcctctgctgcagattcttctccacgcgacccaaaatactgccggcgcgatatgtctgctcatgtatgtttactttgtaccatttgaatcgacagtatgaactaacgagataggttacctctcgtttgtctggtcttcgccacactcagcgtgatgacgacgagtagtcggatgatttttgcattcgctcggtgagtcacatatactggttctttgaaaaggaagacctactaacttaagcaagggacggtggtctccccgcatcgcgattcttcgcccatgtccaccagagactcggactacctctgaatgcactggcattgaccacattagtcgttataatattcggtctgatcttccttgggtcttcaaggtaggttctatctacaacatcaacaatagaatacccaactaacaagaaagtgccttcaacgccatcgtctcatcctccgtcgtagcactggatctatcctacgccatgccgatcgctgtcaactgcctccgcggacggaaaacattacccgatcggaagttccagatcccgaatgctatcggatgggtaattgatattgtaagttgtcatagcttctattccggtctgagtgatagatatggtgtcaactaatggtgtgtgtatcgtagatctccctgtcttatatcgttctgacgactgtcttgtttctgttccctccttctcggccggtgacggggagtagcatgagtatgtatatccagggaattctctagttctatctagtgtgtatgctgacagatgtagattactgtatcgttgcattcgggattatcgtcctggtgtcggttgtgcagtggattgtggatggacggaggaatttcacggggcctagggttgagacctagctagctttgtccggagatgcagtttactacttaatgtcctggataaatagtagagtggtatttgttacctgtgcatgagggatgtcttgttcttgttgcgacgttgcatgaccaggcgacgaataaactccgaacagccacagcaaagctgtaatactacccaatcagaagagtctaagggtaccctgacctaatgtattacgagaccagcataaccaatggcctgagggttgcagcagtacaaagcaaaggttaccaaactgtcgattcgacagatcacagcaccaagactgacaacactacttcattcacttagagcacacaagaccatatcagataaaaaaaaatataattaactcatatgccagcatacagccaagatcccagatctcacgttaaataaaataataacataaataaaccaaaatcatcgctacaatccaagcacccaaactccacaaatgcagtatcctatcctatcagaaccagtccgagatcatgatcattcgtcgagacagtcagagattactgaatctcgtagagagcgaacgcgcgctcgatatcttgtaaggtctctttgtctccgtatgcatccatcaaggctttgttgcggtggagacgttctgcttcctcggggtcgtaggcaggagtgggggcgttgtagtaattgtagacgccgaagcctgggattgaattgttagatagatgtttttgaggggttttgttgaggtgaagagaggagaggtttaccgagggctatcatccccatggttgggaggtacctggattcaggatatgttagtaccttttcttctttctatgatgaataaagtagggaataagtgaaatataccatttaccaatattgcccttgacaggaggaatgtaaacaggccgcttgaagtgcgggcgctgtggtgcggacggggtggtggaagtatccatctttggatgtacgtatggggtaaaacttgttcacggtggaaatggaaatcttggggaaattagagttcttaatggggttggggagagtattcttatatctctggttataattgtggagagtcagtgatgtgatttagtgtggcatgatcggaaatcgtatgattggaattcaatgatcttcaacgtcaatcatgaaactcttgcagctgctgatcatcatgacattattgatgcaatgataccccgatctaacaccttccgcgattttacccgtgtattaggaagtaatctggtttgaccaaagatatttccgtcctgcctttgcttaactaccgtggtctctacccgagctcggatccaaggatatgcatattgaaccgtatccaatgagtctttggtctgaagatcctcggcgatcatgtcctttttgtctcttgatgacgccctatctgcttgtatgattttgtcatcgcacttacttgattccctggagcagctccatccagtccctacgctcttggcatgaagctctacaatgcttgccgaccgcgactggcactcatctcctttctatacagcttagacactatattggggtgtgcgaggcgatctaagacacatacggtgtaggtggggatagcctttttgcaggaaagcctgttcattattgtcgggattagggtttcaagcaataatcacgagacagacggccccgaacgcagttgagtagtagttacaagggcgatgcaccgtacacagtacgtttaattggtgatcctataacttccacttattatctttcttctatgtaccgggtatgacagtttggcgctcggtggagattctgcgtcaccagcaagtgcacaactaggaagccaattgttagacactaattagttgatggaattctgattgattgatcctggaagatcacacgtccagctacatttcttttatattgcatatcgttatgaagcattatctgggaagttctcatcaaatcatacctaggactatccagtgtagtcgcggaagggcaccggaataggtatatggacaggatggaaccacgccgactatccaccgagatatactactcaacaaacaaataataataacatgattgatatcccaggaaacagaagatgaggggtgaaatgaggtgaatcttacaaggctgagtgctcgtatgcaggtcaatacccgatggtggggtgacggcgcttatggagattcacacatcaattacccaccagcagctggaatttgtacctgtttcccagatatttcttcacaagatcattcactgtacatatcgcttctgaaaatatggaaatcgtactctctagtccaccaatatacctttattctcctctaccggaaggctatatccgcttactccgactgctgccacatcaggataaacatgctccaatacaatgtcaactgtttgactatcctctccacagctatgtggtagggacccaccggtacgaggccctgtcgtatgtatggggctccccagaaaagccttactctattttcctcgatgatggctgcttatccgtgacaacgaatctctatgcggcgttattacatcttcgagatcgctttatcgaacgcgtgatatggatagatgctgtatgcatcaatcagactgatttagatgagcggggtagccaggtccagtttatggccgagatatttgccaaagcgagctgtgtaatcgtttggcttgaagaggaggctaccagcatccatgatgacaagacctccgatgaaggcggtagagccctcgaggtaatacaaaaggctgcagagggttactgtaggacaggcatggacgaggaaaaagcggttctcgctttacttgaacggtcgtggtttcggcgtgtctgggtaagatagtaagcaatttagagtgttaagagggatcctgacagtttcaggtacttcaagagattgctgcagcgcgacatatcctgatagcatgtcattccgctgaaatcgacggacatgccttcgcttctggtctaacggcactgaaaacgctcattgtcgatgcgaacatgcgagatcagatcggcatggcggtatttctaataaagaatgcgaccttgcgacataagcgcgtgattgctggtcctgataaactttcccttcacatacgttcattagcagatttgacaaccatgtataacaaccatgaagctactgattgccgggacaaggtttatgctctactaggcatgagctccgataatcatggtccgggggccatattgcctgtctataccgtgtcatggaaggatataacctgtcgacttatcaggttttatgttggtgagcaggcatgtgtacagacatgggacgatgaagatattgcagtgatcaagggtaaaggttgtgttcttggcgtggtaaaaagggtgaagctgaactcatccaaagacaatatgtgggataatagccacaatgcgtttgtcaccatgcaattgacaggtggagatgagagaggagatggggatatgtggaccttctgtaaatggccggggctgataaaaaagggtgatatcgtctgtgttttgcaaggagcgtccaagcctacactcataaggccatgtggtgatcactgtgccgttattacggttggcttcgttcctcacagtgcagattactcaatgcatgggatacaatctgcgaatgggggggaaatcgatgagtggaacggccttctacagtcggtagccttatacccaagggatttcctgcttgtctgggaatggcaagggttctccggaagactcgaaaatgaaaaagatcgggcatggcttatggatcgtcgattaccagaacgtgcgaagagagagttagcagttgaaatgcctaagttacatagattacaaaatcttggactaatattggttgattcggagaagtttgaacaggcgctggaacactttccacaagcgttggacttctatggcccgaaagctgaggaggcttacttacccatattcacagcgataatgaacattgccatgtcatggagggtgccgagtgacgtggcgatactgagaagcatggtggatatagcccgacgaagaggagactttgttatgattgcggaagatacaatggctgaaattgtaaagtcagacgatgctctacggtggatggaattccttttcacccaaagaaggaacgagcttccgatcactgaaaaagtgcttgaagaagcagccgcaaatcaaacatgcagcggtgaacttatgagctttatacttgaccgagcaggaccagaaatcagaattacggaaaagatacttctggcagcggctcaaaatccaggctatccagtggatattatgagatcaattttcgtccgacgagagaacgagctccaaatcactgaaaacatattcatggcggcaaaatcaaacaaaaagtggggaagagacttggtaattatcctagatgtgcaaaggataaagctttcacagaatccgcatgtaaggtattggaatgtgaaggctaacctaggcccgactatactagatgatttgttttaaccatatctctggacaaggccctttatatcgttgagcatcctagcggcttttgttagtacaaagtgtgtcctctagaattaaaatgaactcttactgctctctaagtgtgtgattctctgtgaataaggcagagacatgagtgttgaatctcctaccaaagagtcagtacttaatgatcatttgttacaggttcgtgggcatgctcacaacttgtaaagatccagccggccatcataatcttcttcaggtgccgatacctggacatatgagtgatacgctgccaggtattcgtcgccaaatcggttacagataggccgccactggccaaactcatctatatgtagcccgagatgttagcaagaacactgttagtctaagagctaaacgatagaacatacattcattatgcgcgtagaaggagcaggcatcaaacacaagagagtcgcccgtctccacgtcaatccctgagtttgcataccacaaatctccgtgaacaagcgagggctttacagaccggccatctgactcaagcggacgcagcagatgaggtataactttgtcaaagaggagcgggagcagatgatctagttctgggtctggtccttttgcctttatctccagatcaagggctttcttcaaactttttgcgaagaaagtctcccagctgtcttcccactcggtcatctgaggtagattgccgctgtatgtagtcatgtggaagccaaactttcccgtcggcgacttactgctttcatgcagagtcgcaaggcgcgcagcaaatttatgtggatctggcatgtcatctgtcatctctcgatagtcacatagaagataatgcatgtctggaacgtcctggtaagttccccatgcgattggctttggtgcgaagtccggcagaagagtgtgtatcgccttcattgactcgtattccccatgaaccatgttcttgccgcgttcgttagacacaaccttcatgaagaatgagaacggagttccgtcctctaattcgacatttatgcggccagtgtggccccaaaagctgattccatgactctctgtggatacaacacgacatcctttaggtaagtcttgtctatcgtcagcatgggacatgctcgacgctaataatgatgctcactggcaacaacgctggggtcaactctattctccccatcaaaattcgggacataggtcccagtatctcccatgatcctgatgtcctgactatgatattcacctgagcaggtcagatttgatacgctttatagtgccgacaagagccaaatgagaggtttttctaagggtcgatgggctcacttgtgctgaacaaatacaggctatgtgatatgtttagaaaaaaaaaaaaaatagttctagagatgccagtggacacaggagaggaagagtcaatgtttagcatggcggagcaatgtacagtcgcgaaaatcctaagcgcccacctggtggtacctggtggggtaatcgtagatattcgtgttgcgctcaacgcctcggctcacgtccccaccagcatagaattttaagacatcttatatggttgactatcagtagagacagtcatgcactattaaaaaggaaaaatagattcatttgtaggcacagtccacacttctacaactttggaatcgttcacactgattattgaggttattcccggatattggtcaccttcgagcttgatttatgtatttcctttacccgaagaatggtatcaacaataatatgtctgtaggatatagatagaaagataaaccgactgactcgtaggctttcgacttaaacaagattcattttacattttagctctattttatcccgttcatctcacttaaattggcgattggctttgccgcgaaaacagtaccttatacttggccaattactaaatccctagagttatcatctaagctcgctaatactatgattatagtcatctagattcttacacatagggaattgtaagtcatacttgatctgaaattgaattgtattcaagtcgttgtaaaggcttgtctgccctcaggtgttggctcacttattgtgccccgctgtagagacttctaaaatacggtcttccattccctccacgcatataacctggacgcccgcatcttccagtatctttcttccagtgttatcagcgataaacgtctccggctctgtgattcccacatacacgaccttgagtgagctggccagtcccaatatcctttgcacgcaagttctgttgccactcaaccgcctgctgcatggttccatggtagtataaagaactgtattccttggtaatacttcaaccagctccgcttctggcacattgtgctggtcagccaccttgatgaagcagcattgctctgcatgtgtgtttcctggatctccgggtctatctcccggaagttccattgaatagccggtggatagaatttcgtttcgatcagcatcgactagcactgcccccacgcagaactttgtaggtgagggaggggacagacgggctttttcaagggcacattccatataccctttgtggtctccgactgcgatgtttgggtgacaatctggagatgtcattgtcttgtcaagggtggtacagtgaagtattctcaaaagtactgggcatgttcagatattttccaaccgaatagtgtggatctcgttaaggagttaccctagtcagggatgatatggtgttaccttaggcttgaaactgtcatgggactgtaggggtgccctaggatatatatgaccgtcaattaatcaagggttccttacgattgtctttttaattagttcgaaggtaaatgcacttagcgcatagtgcattgaattttcaaatcaaagaaattcccagtatgaaacgcagagcgcattagaagaaatagcaatatgcacgattggttcgccaaaatgacaaaaataccaaggttcttaaacataaacgcgtgatgtcccgaaagccctggtgatcgataactatgtcgccttctgctcccgtaggctgcccatcaaacatggctctgaaagggatcacaagaggtcctccgtcaattgatgtgggtgtaacgattacttcctgaatacagaaagctatttgggcgttcgcctgcatctggttgggttgcaggcttatcgctcacgtgggggtgttggccctcataaatatccccagatgccgagtaagggacgtgcgagactcaaacattctaatctcaactgcagaaccatttgttccagacattgtagtatttctttctgatcgttcagctgttcttttcagaagcgaattcgagatctccacacgtgcatgaggggcgccgtccaaggccaagagacgccggtcgtgttttatccctgccgataaccagaaggatcctatgggaagatacgaggaacagccatcgacatcacacaggagactaatctcctgccacggttgcactatccaatggaaagatcccatcgtctcattgactgattcaaccacggccttaaccagtgcgaccctccataagaaaccttaagaacccaaatcttgactctagcgtcactgcagggaataacctatttactttggtttatacgccgttcctttccttattcatttcttgctccgatcgcactctttcaatagctggagcatatcaccgtgtttgacatggttttataattgtcgacttaggcctcttactgactgcattggggcacagctagtctgtccttatttcaattaatttcttgtctttctctcgcgttattgtttacttcgtcgagctgtcgcgtgcccacaaaaacattcaatcgccccttactttcgtgccccaaccagcagcttgcatcaattttgtacaaccagcggccggaatcgatcaccaattgatcgcaaccgattgagccccttgcgccactccccaatgcaactgtacttttgtccatcgtaactgcaaatgttcttaaaaacgctattttcccctcgcccgcgcagctacacgttgctgcagcccgtgcaccacagccctacggaattcgccatgcgaacgtcgaaaacagacaaggtcgtcaccacggccaccgatggcgacggcccagcaggcaatctggacggggacgtgagaaggctggcagagatgggctacacacaggacatgcagcggaatttctccgtgatatcgttactgggtgtggccttctcgctggctaactcgtggttcggtatctccgcctcgctgatcaccggtatcaagtccggtggaacagtactgaccatctacggaattccctggatcgccttcgtctcgacctgcgtcggcgtcacgctgtccgagctggcctcggccatgcccaacgccggcggacaatacttctgggccagcgagctctcccccaaaagatacgccgcattcgcctcgtacctcacaggatggctcgcctgggccggcgccatcttcacctgcgccagtgtagccctaagcctaggctccgccggcgtcggcatgtggcagctatcccatccagacttgtacgtcttcacaccagcaaaacctcgccaaacacccatctaaccagaaaacccacagcgtccccaagccctggcactccgtagtcgcctacgaagtaatcaacctcttcgccttcctcttcaactgcatcggcaaagccctccccacagtcgccaccgcaaccctctacatctcactcatctccttcgccgtgatcctcatcaccgtccccgccacagcaccctcccacgccaacgccagattcgtcttcgccaacttcgtcaactcaaccggctggccctccgacggcctcgccttcctcgtcggcctcatcaacccaaactgggtcttcgcctgcctcgactcagccacccacctcgccgaagaagtctcccgccccgaacgctccatcccaatcgccatcctcgccaccgtcgccatcggcttcaccacctcctggttctactgcatagccatgttcttcagcgtcaccaacctagacccaatcctctccacccccaccggcgtccccatcctcgccctcttccaacaagccctgcagaacaaagcaggcgccatagccctcgaatccctcatcctagtcacaggaatcgggtgcctaatcgcctgccacacatggcaatcccgtctctgctggtcctttgcccgagaccgcggccttcctttctctcccttcttggcgaagattcacccaaccctcgacgtgccctttaacgcgcacagcgtcagctgcttcatcgtcgggttactgggtctgttgtatctgggttcttcgacggctttcaatagcatggtctcggcgtgtattgtcttgctttattcgagttatgttgttcctgttattgctttgttgtataaggggagggagaatatttcccatggaccgttttggttggggagggtcggttgggtttgtaattgggttgttctgggttggacggtgttttgtttggtggtttattcgtttccgagtgtttatccggttacgactgggagtgagtttccttttcttttgtcttttggttggctctttgggttttgggttgggttattgtttttgggggttgtggaatgtgctaacgagactagatatgaactacgtttgtgtggtgtatgccgttgtcgggtgtattattgcggtagattgggtggtgagggggaaaaggaggtttcggggacagcataccagacaccaggtggaggaacatgttgggcattatgctgattaatggattggatttactaatgcatttatatagtaatgggtggaatgtgggtttgatatattgataatgtgcattagatattaatcagattcatattcacagaatatgcgtataatacataatcctcgactccattacgttatttcacatggttcacgtcgatatcccacggtgcatcttgatctgggatcatatataccaaccgagtaatcttgttcttctgtccatctaggtctttggatagattagacgagaaacttagatgtactcccaggcagcagcgggtccagtgtatggggcagcaacagccgagaatccaaggcagtctctgacgttgccggtgggcacggtggcattgttggaggcagcaaacacctgccacttggggttaccgggcacgatggtgctgttggtggtggggcaggccatgaagccgttcttgtaggtccagctaccgagggtgccgttcttgccgggcttgtaggcgaagccctcagtcgaggagccggggggagtgtagccggagtgaggagtggtgaaggagagggcgccctgggggtcgacgtagatgctctggccaccggggacggcgacgtcctggattttgagttagccattgtttgctgatacggggtgaagaggaacacctacaaggtacttgtcgccgaggagagcggtctccttgcccggggggcaggcgcccagcttctcgatgttctcggggcagtaggtggcggcctttccgccgaggtagaagtgggagttggcggcgttcagggtaaggaagtggatgggagaggcggaacgagcggcgacgacaccgaaggcgttggggtcattctgagccttaggggcaggcacagagggaagagcagagactgctgcaacgagggaggaaatggcaaggaacttcattgtgatcgagtggtattatttttgtttatatccgggtttataaaaagatgttataggttttggaggtgatacggctaggaggaaggggtggcagggatttatttatacgggacttctgctctagaaatttcggtcactcgttatcatggtgacctcgctagtgttgtgcccggttcatcgatagtgaacgatttttcgcatgtggccaggcatctatgtgagacaatccccacatcggacaggaatttgccgtccggaaactgcggttaacagcaatgatcggcccgatcggcaggtctgaaggatatcggctggccctgtgggtaatttccgccggaatatcactggccgcgactcagggtcttgaccgtttcctggtgctactagcgtgtggctgagagccaaggaagaagggttctcgcggagggatcgggtggcactcccattgccgatgatgttatgtttcatggctgtgcagcttgctctatatatatctagattctatgtgcagttaaaaaaaaagtaaagttaattacaaggtatgtcgcttactgtaaagggtaatcagaatgggcatcagtttcagtacttgccgtgcaagggcagatcccgcgaactctgcccgacccagatctgaaagtcgccgtccggcatgacccaattctgttggcgagcactccagtaactgagatccttgcggcttagagtcatttcaactgtcttcttttcgcccggttccaaagcaatcttggtgaaattgcggagaacccggtctgggaattcgacctgttctttacttggcacaaaggtcacagtctcccccttttcgtctaccggcacctctactaagtcgccctcttctaccacgtccgatgggaatgacacgtaggcctggaccacggtctgaccagcgcgggcacccgtgttagccacttgcacttgcactttagccatctcttcatatagcgacgggtttccaccgaggtcgcctcctgcttcagacggctgtcgtggcaagtcatagccgtcggggtattctgtataatttgctgcggctgtgccatccagcgatggcagatacgagtagacgtacttgcttagcgcgtggaacccttccgggaaaagcacattttcatttacgggtgggcgagtatcatactctggcggggagacttggtcttgcggtcgcgacttgggcagtcgggacttccattgcatcgacttaatgtacagcttggatagctcgaaactggtgtaggagagaccgaagccgaactcatatcgaggcgtgatgttaaatttgtcgaagtaccggtagtcaatgtacagcgcgtccaagaagtcaacttgtggcactggggcattgttttcatatagcacttgtgcccctggtccgtagtcctccaggctctttccaactgtatatggcagtcgaccgctcgcgtcaacgtcgccaaacaggacatccacgagtgcattgccgctttcttgaccgggcagatgggcaaagagcaccgcatccacgcctgggagatcaatccatgactccacgacgaccgggccgacagcgtgaacaaccaccactgtcggtcccgcacagttgttagccacggcttgaatcaatgtgtcgcctcccttctgcaagaatagatcattacgatcaccgtgaattcccccagcatgaatatacccctcgccggaattcgcgttggcgaacacaagacacaggtctttatcttgaacactcacgggcatcaccatattctgcagatatggggttatctcgacttcggtttcccaagcaccctgcaaagcctccagaggactcacaaggaaaggaaattccacagtcccactgccccagcctgacgctaatgtcccctgactgcatccacgatcggggcacgcatttggtcctaaggccgggccagcatcgtcaccatagatcccaatgcgataaggactcggcgggctacgagacagcggtagggtgttattgttgttcttcactaggacgatgccttccgctgctacttttctcgcgatgtccccgtgtcctgcgccggcatccacgtacttgttaacaataccccatccgccatcctgatcgcctgcctcgacactggcttgttgccaccagccggtttggtcatccgtccaagaggaaaagttgggaccgccctccccgtctggcggtggccgttcccattggtcctgtccgagatgataccatgccgccacgatacgggtcaccatgtcgttcagtcgctccatggggatagacgtgttgagcacggcacgggtcagttcgctgccccacagggactttccgtccgcccagtgcaaaccatcgcctggcatgctcatgtccagcccacccaatgcgctgttgatccccgatcgttgagccagccagtcggactgcacaaatccctggaaccccagctcgtctttgagaatcccattcaggagtttgctgttttcgcaggcgtgactgttgttcaccatctggtatgcgcacatgacactggctacgtccgcgcggatactctcggcaaaaggccatgcaaacacctcatgcaaggcacgatcgccgacgttggatgatagcgcggtcggaatcccccattcaaagggttgtcgaaagtgttcctgctcgttcatcacgaaatgtttggcggtagccatgacgccattactctgtatgcccttgatcgtctctgcggcagcaactccctgcagcacgggatcggaaccgaaagcctcccagtttcttccacctgcgggcatcattccgagaggtcccattgacggcccgagaaggacattgacgcccttcaaacgcgcctccaaccccatcgcaatccctcgttcccgaattaggtcgcgattccaggtggcacccgtagtcaaaccaggtgggaaggctgaaatgtgatccgcgtatcgtattcccatcgggccgtcttgtaagcacagggaggggaagtggacagattcggccggccctaagtgtgtgtaagtaattgtttggcgcacacaaggacatacaaaaacatacccgtattacccacacagagtcccatctgccaaccggtcccagtcgtgatgttgaccttttcgatgagggtcatattcccaaccaacagcgccgctttttgataatccgctgcccattcctttaaggctccgccccgcgggctaggaaaccaagattcagccgggatcattgactgtggctcgtcagcacgctccactatatccccatgcaatcgttctataagcagcagggcgacaacatacataatccagctcgtccccaacctgtttcgacctcgcaaggcccaggaataccaacaccaggaggaccaagaccaccacaaccccaatcagagcacgccaccaatactttgagtaatagaccgtccgccaacctgtccgaccatcgtgtgtccgttttagtaatccctgcctctgtccccttttcaccccgacaccgtatccgtccgaatcatcgtcgtcgtcatccacgccgtcatattgtcgacttgccgacagcaactccagctctgcctcggctatactatcgaaatacgcttcgacatcgccagattttcgcacgacgggaacataggcggttgcttgattactgcgggttccgttgcggtcaacgcgacggagtctaatctcggagtcatcctcgccatcagacgggtcggagaggggaagagagtcggcatccgagctgtattgtttatcgttgagctcttcggggatcgattcgtgcaatggagtgtaccgctgagagctcttagcggatgatggtgcgtcccggaaagggggaggaggcatggcgtttaggcgcgaggaagcatggagaaacgagtgtaagaaaacaaaaggaagcaagagttaaccgaacgtcggtacttgacctccgcacatgggacgaaaaggagaaatatgatggagtgtgcagaacccgaaatagtaatgattgttcactgccgccaaacgggccagaccctggatgagccaatcagagggcgggcatctcggagattacgccatgagggccgatcctctgggttcgtttgattgggatcagtaactgcattagacaaagatgtcgagtatttcttctggcaagtatctggaaaaaggaaagaagggaaaaatagagggatagaaattggccttggtgaaagaagagagagaatccggggaaaacagcgcaagcgtcggagacattaagtttgctcctttgggtcggattcgatgcagccttactcattccgtcctagtgctgactcctaattaggtctggtgcgttgcttctgcattggaccctggaaacaacggctatatactagtcgagtaatatagagtatataagatattgctctcaattcaatttctatggtatacgacactaaaacctagctggagtgaagtaagtttagtgttcataaggtggtcggaatatacttccacgtgacaacccggttgcgatggctatgtggccggatcataatgacttcaaccggtgtccaatgcatccaagaccgttgttgaacaacaggagatcttcttcagagaaacaattgatctctgtttttgttgccggttatatttggcgatcgctcttttcttcatattaatatggcagtgttgagcgtcgccgtgtcagttttcgcttcgcggactcctttcaagatcctcatatgtttttgcttctcatctggaaatcctcagcctgtttgatttggtcttgggcttcgtggtagcggatcatccggcctgtcgagatctattcgcttcctggagtttccgtccctcttcctggttttgagcgcgctgagccgcacgcgctgtcgctcgtttagccttctgacactcatccgcaacaggagcgatggctgattgcaacttgcgctcttccattgtttgcttgcgccgagctcatactggcaagaaaacatgagttatcttgcttgaattgctgaacttgttcgaacagccgactggtgcgacgagttcaacggcgcaaacgatttgaacaattgacacaaatcaggcttagatgtcaatagtacaaatcataatgaccccatactaagcatcgtccaccgcacttggcggataccatccaatctggttggctggccactgcagccagacccgttgttgctcattgaaggaccggtagatttcgcccattacatgttcaggccaaccctttacaaaccagtaagaattcaactgttgcagcaaaacgaggaagtgggatagcagaagcaaggcaggccattttcgttgttgaagatcaaacacaaactcatccggcagttgataaagccactggaatgttttggcacatcgctcgcccctgctgttatctatctttccgtaaacatgatggaaggcgtttgtcagacaagtgagaacgtgtacgtaaacggcatgctgaataccaccaccagcagtatattccgtctcaatcaattgctcacactccttgagcctccctttccattcaggccaggtgttttcgtgacgtaactgcggttcgtcttggagtaatctctctctagtttccgacccagggctggagactggatctatatagaacacgtctcgcgacacttcagttatagatcggattcctcgcagtagtgtgagccattctgcacggtcggaatcactgaaggcaagatattccccatctcgaggcccttttgctaaagagcataaacatatcaataccgagctgccatacaccgcctgacatgtactttcattcagttcagctatcaaggagctcacttgggagagtgcagtgttgtaatgacagtcgccttctaagtaccgcccatgtgatgcactcatactcgacgaccgagccatgtggtagctcgcaaaagccagaagcagatgtaagatatactgaaagcgaaaccctacttgcggaagagctacctggagtaaatgcagtccctcgtcatcatcggctagggctatcacggtaaccgacaaataatgatggagtagctctagatcagtcgtattgagctgcaattgagaattagtaggggtaggaagaacctcagccaacgccaagtcagcgttggctgtctccctagcggtagctggtcgccgctgatatcttcttttcggcaatttaaagtccgtcttggaggatgatataaaggtaatgctactataaggtgagggtgccgcgcgtgctactagtgttgaacacgaaacaggagttcctgttgagcctgtggacgctgtttcggatggggcaatctgctggaccgtgaagtcgcaattgatatcgtggctagtgcattgcccgcatgcagggtggacttcatcacactagggacgattagtaagtctttgggaatctatctggtaattgtcgtatccccattgtacacttactttgattttgcgccgtttacaatttccacatccgttacgggatttccgatgagatctgcgggaccattttgtccgcctcgcctccatcttctagaagctaaccatttgaagggaaaggattggaaagtttgaatgttgtgaacaagaccaaggcttgggaaggttcactcggtggaaaagtcacagttgcgatgaaactgaatggatccacgcattctaaaacagacaatcggcacgattccatttcaggcatagtcgctaccggaagagggttacggagtatatgtaatctacagtttttcatgtttgtatttggtggttggtattaagcctctgctactactattcatattcttcagagatagatcaaaacaatgtcgttgaggttaagcactaatggctcctttcgtggtagactgggggcacctggattccaaaagcatacgtagagataccgcctaagacaaagggatgaagtgccatgcgcgtaagctgataagactatagaggatgtgagcaatggtgactgcgccaaaaagagcgacaagtaaaaaacccgcggcattgtcaggccgatactcatacaaaacaatttgcgtgccattgaccacaggtccatagccatgctcaatgctcatgatcaggaggaatcggtaaatgggaaagaaaaacagacatggaatggtcgagagaggccaccggcgtgatatgggtatgtggtgacagtttgcgtcctgatgtgctacaaatctgtggccatcgtgctcgtataacatgccattaactcctaattctagaagtatgcatagaacaggcggatgcgcaggctatcgttctctagcagctgttaacctttgaaaggagattcttagggctccagctccatggtggggttaccgtatatggaacttatccgtattcgtgctttttcccattctgggtaaggcccttttcgaaacctaatcttcagatattccacgagaaaagagaatcagatgggtccacaggaaagtagtttcgtgatgtgaggtcatggcagtgcagatctctcttaggcagacgtgtctctcatccatgctcgaatataaaaagccccccggatgaatcgttccgactcagggcttatcatcctcacccatcatgcttggcctcatctccctggtcctggcggctagccggcttaccactgcactggactgcaaatgcgtaagggatacccttcctaaatacctcccaagtataaaagtactcacgcgacccagtcaccatccgacccatgctggccagccgactcggaatgggcttcgctcaacgaaacgatctcgggtcaccttattcgaacagtcccccttggagcagtatgctatcggaccgagtccgtctataatcccgaggcttgcactactgttctcgcaaattggtcaacctccgctttccattctgctgatccggccagtatcgatgaccccatgtgggcgaataatagctgcaatcccatatattccaatggcactagcctcacaggtaatatccacgcaggcgaaaagggttgttcgattgggaattatccaccgtttgtagtgaacgcgacggagcctggccatgtgcaagctgcgctgaagtttgcgaggagatggaacctgcggttgaatatcaagaacacgggacatggctcggaaagaaggtaagtttaactatataattttataccatcacttcctgtctttctcagggttggctaacttgaccttgcttttagcaccggccatggaagcttgtcgtgcgtgaacccccctcctcccacgagatagatacatatatttaacgtttccataggatctggacccataacctgaaacagatccaatttcacgagaacttccagcctcagtcatgcaagactggaacaagggtaaacgaaactcaaatggcaaccaccctaggagccggtgtgcaagatggagagctgttcaaagcgatgtcgaaacacaaagccatcgcagtgggtggaaccaacgctgtatgataaacattcagtgctcctgggatgtaaaccaagttgacaagaacgaataggacgttggtgtcgtgggatgggcaacgggtggtggtcatggcctggctaccggcaaatacggcatgggtgctgacaatatcatcgaggcagtcgtcgtaacacccacaggtgaagtggttgcggctaatgcttgccaaaacagagatctcttttgggccatccgcggtgggggcgggggtacatttggtgtcatactgagtgttactctgaaagcgtaccccatgccatcagtgaccctcgtaaatctgtcaatgtcagctaagaatggaactcatccgtcgagttggtacagatttgttgcccgggcccacgcacacttggacctcttgcaagaagcgggcgttcatgggtactatacgatgggtggaggatctttgacactgcaaggcgctctactcatttatgatgctcaaaatgggacagtggaaaaccttcttgcgccgatgcgaaggttctttgatgcttctaatgcaactgccacctcaagtctcacgccacttgtaacattaccgtggtatgaacttgtcgagatgatgcccactaccgaatccgtgggtacgaagcaaagcgtcagagcatctcggtttatcccacgaaaggtagtcaaggatgatatcgaattatttgcagagaccctagaggcaatcacctctcaccctggtcctctgaacgtgagtaccctctgtcactcccctttgctttagaaaactctcagctaagacgataaatcacataggatggagtctcgcctccatcaatttcaggaaccatgacgggtagcaggacgcctgttgacaacgccctaaaccctgcctggcgagactctgttgtccatatcatcacttctcaaagctgggacgaatccttacctcccgccgtggctgaccgggtagtccacaatatgacgtaccagaaaggctatgcattgcgacaacttgcgcctgatacaggtgcttacttcaatgaggtgagaatgcaagatctctgcctactcaagtatgcgtttgttgctaatgagtatatttcttacgtaggccaacgcaaacgagtcaacttggcagtggtcttttttcggtgatcactatcctagacttcaatcgatcaagcaaaagtacgacccagagggtctactgtggtgtcgtcagtgtgtgggaagcgagagatggacggaacaggaggatgggaagctctgccgtgccttttaagagggttgtccagttgaagaacaacttctgcagtatgtatgattgatacttctcttgagattatagcttggatctgctgtgttaacgtataatcgtgaagctatagagatagctaggtggcaaacaaaatcccattgcagttagaaattcatccaggcatcctccagttattttttatgttgtcgcttattccaaagcccctaaaacgctttgtctcgctttgatagccaaaaacattagtgaaaaaagagagagaaaaagaaaatacataagaattacacatcacatgaccacttagatcacattacgctaggtactagtattcgtaccaaagtcactaataggctagctaaagtttttgtggtccaactacttgctccttttcagatggttcatgttgatcttattgcactaaactaggaccctaaaagaccatcatactggtagggtccacccagatacgacttgacgaacaacactgatgcacataaccctgatgctcatttggaactaaacaaaggaaattaaaatatcaaatgctccatggtataatcatacaaatcataacgcaattacagcttggacacctggcccgctgacgaaatctcgttgtacaacaagctggtcaagaaatccgcataatcctcgcctgtcacctgaccggcgaagtagcgggctgccagctggtacttgttgcccttggggcccttctccgccaggctgtcggcctgctccttgagcaaacgcagagcatatgccttgtcgaccttcttgccctcggccgtggtgacgccgtggtaggtccattgccagagttgactgcgagacacttcggcggtggcagcgtcctcctatttggggttagcttgatattacttaatactctgtagagaatggaaaagaaacgtaccatcaggtagttgatcggaatgcatccgactccacggagccagccttccatgtacgagagaccgatgttcaagttcttccggataccctcctcggtgatcttgccgggcacgttggtgttcaagagatcattggcggtaacatgggtgtcctcgcggcggatgaagagctggttgggcgtgggcatgtgcttgttgaatacctcggaggcgatcgcggcgagagccgggtgagccacccaggtaccgtcgtgaccagcacgaacctcacgcagcttgtcggcgcgcacactctccatggccttgtcgttggcagcctggttgtccttgatggggatctgagcggccataccaccctgtttcggttagcatatttcgcgcatggcgtgtgttacagggaatgcttaccatagcgtgaacaccacgacggtggcaggtcttgatcaacagtctcacataggcatccatgaagggcacagtcatggtgacgtccgaacgatcgggaaggacgaagttggggtgcttgcggaatttcttgatgaaggagaagatgtagtcccagcgaccgcagttcagcccggagctgtgttcacggagttcgtagataatctcgtccatctcgaaggcagcgctgatggtctcgatcaagacagtaccacggatggttccgcgaggcatgccaatgtaatcctgggccaggttgaagacgtcgttccatagtctggcctccagatgggactccatcttaggaagatagaagtaaggcccgaacccgcgagccaccagttccttggcgttgtggaagaagtagagaccgaagtcgaacaaactaccggagatcggctctccgttgacggtgaagtgcttctcatccaggtgccagccacgggcacgagcgatcaaagttgggagggtgcggtcggtgcgcagcttgtattccttgttgccctgtttgaagtcgatctggcgacggatggcatcatacaggttgacctgaccgttgatcatgttttcccaggtcggggcgctcgagtctgtatccaccgtcagcatgtctcccagagtggtgttccagcaaatgacataccctcaaaatcagccatgtaggtccagacatcagcattcagcgcattcaccaccatcttccggtccgtcgggccggtaatttcaacacgacggtcgacaagaccgggagcgggaggagcacccttccaggcgtcattctcacggatgtgcttggtctctgggaggaagtcgagtagatgacccttgtcgagctcggcctggcgatcaattcggcgctggagaagagctttacgggtcgggttgaaggtgcggtgcaggatcgccaggaaggcacaagcttccttggtgaggatcttgcgggcgtcattggggatggcgcccaggatggcgacatccttgagctgcacgtcgatttggctcatgattgtaatccttgttcttgtcgaagtatgtagctaacgaacaagtgtacgaagacaaattggaaacagacaaagagaaaaaaagaagcaacgagcgaggtacgacaaacgggtatataagtacaatcggctggagcaatggagaatacgtcagaaccatggacaaccgcggctgatgggaaactctggttcaacctgataggcgagagctaccattctgaacggtaacgcagtgtattgtaattcagcatgctgcagaatatcttaattgtccatctattgtgaatggacctgtgataggacaggaaccagtcactggccaccatcgcatatcgatatcggagaggatgagcggaaatttcctgatcgggatgcaactggggagcttccagctccatcccgtgactttgccgcggagaattggttatcttactggtaataccaatacacgaccagggctagctgtcgctctcggccgacactccccacgaccgattagattcccctcatccgggggccgccgcataccgataagctctttatcaatattagaacactcgatgactacaatgctatacatatatccgcctcgcgactgctagagagcaggaatttacgttatttgccaattccatggccacccgttcttaccgagtcgagtcgatcatgaccacgacggtaccgtttgatactgtttccacacgctcctgacctggtcgcaggaactaccgagggataaagataataaactccccgcacatccgaatcttccactcacagccgcggccctcccgaaacgtcaccatgatttgctgcagccacgaaaagcgtgtcttgcctcaggctgccgattgattccgatgcggtcgcgctacacgataagataacctaattacagagtcgaggcgttgaaagttatatcttttggttcggtttaccaacacgacgtgtaatgcgactacattgggcctgaattcagttgtcaagtagtaatactcagcgatactactatcctacaatactaatcaactaccattagagatcatggaatatttgtcccttcgcccaaatgggatgagaatggcatgtgatcctctgagcatgtgatgttgtagcttgtgaatcatcgtgttcaccccagatcccggttctctcccgacaactcgtccaaggatcgggatgacacgggcagtcaaatcctctactctgctctggttgaccgaaaggactacccgaaactttgcagctttgcagagcacggacaacgctaaaacgaattcattggtatctaacaattctatgtcatatccgcttgccgggacaaagtctagaccgtttcaatatatcgccgcacctccctagagtatggtcagttcacaacgaaagcaagatgatactagcaacaccaaaaacataccaatcggtgacggcctcttcccataggcgtacttcatgttcccgggtgccgccaaaatggtcgacgaaagcatctccaaacacctcccgtgcgacactgcccttgcgcgtaaacgcggcgaccgcttccttgagggacttggccagacgcaccccctggtcgctgccaccccccatctcctcacctttagacagcgggggcacagggatctccagcttcttctccacgccccgccatcccaatgcgactatagccgccaagacataatgcggattggcatctgccccggggactcgcacttctaatcgggtggccttcgggctgcccgttggcggcgtaatcaatcgaatagaggccgcccgatgctccaggccccacgagactgtgacgggggcccagaaattctcaacgagccgtttgtaggaattgacggtcggcgcaaacataggcataatatcagggagacccgtgagaacgcctgctaagaaatatctacccaagtcggacagataagcgacatcggggtaaggtggagatgggtccggggtatcgcgcagaaaagcgttctttccatcactggtaacgagcgaaatatgcatgtggccactatttccaggcaatccctggcgcggtttggccatgaaagtgggtgtgataccgtgcttggttccaattgatttaacaacatacctgtgttgcggttaatatggcttagatcgatcccataaatgacttacttgaaaagccctgctttatctgccatctccttggcttctccaaattgtagcgcctaacaccatcagcattggccgggcaaattccgtgtagagcactcacagcttcgaacacaccgggcccactttctgtatgccatccttcgatgtcgcatttaaattgctcgcacgcatcgaaaatgccataataataatcctggttatgaatagggcgggtcaaactgtacccgaacatcccctcggtcagggaaggtaatgcttccacggggttctctctcaaaaaggtcgccgtggaagacgcgctgcgctcgggtgatggatgggattctggtacacgaaattgataaaattcatactccgctggaagaagtcagcatgtccatatctccaaggaggatgcgacgagtttacgcaccccctgccatcgcccgatacccggccgcctcagccttgccgagtgcggtccttaccagacctcgagggcatgcacatacgggttcccgagtatcgggatcgtggaaactaacgaggaaaaaagggacgttgttctcccagggaatgcgacggaagctgctcagatctggaatggcaacaatatcccgataaccgttctccttgttactgatagccaactccttgaagtatgtctgatcgtgcatgtcccacccgaagataactgagcaaaatccaaacccttctgacacgatggaaaggaactttttcttagagacgagcttcccgcgaagcatcccatcgacatccacacctgccaacttgacacgagtatctcgctgcaggatctccgcgacattgtcgagtgtgacttcaggggaggatacggagcccatattggagctggcagtgaagcaacgtcagttcaaatataggaataaaagtggtcgaaagacatgagcctgcaaacaagggagaatcgcggtctaagaaggtgtgggcggaacgaaggagccacagcgggtcatctgttatcggcgccttatcgtcatgcggatcaaatgaccgcataggagataaactgcttccttgccattgtccattcacatcatattaatgtttggtcgtatgggcccagtatgaccgagaagcttggtcggggccttgcgctcttcatgcttgtcatcctggaaggaagatgataccaggagaatcctcaatcttccgcccctcgttatcagtttatctcaaagtcacttgatgtcacttgattccacaacagcttagataataacctgtgggaactgccccgcgtttcgtggtgtgttgtcaccagctgcttcttcaattgatctactgtgacagagtccctatctttgcgaatcaatactcattccttcgttgtattctagtcgggtcgggactgtcaaccacaaagtgatctccgtaagcgtgagtcttacagtctgcttatgacatcatccagaagtccgatgtccccgccgaggataactactcactgagaatcgcttgctagcaggaatacgacataatggctactccaacaggccgtcttcaagacaagaatgctataatcactggtgctgcagggtgagccccaatacgcaatttttccccccccgcaatgtactaatatagtgtagagggatcggtctcgagactagtatcctcttcgcccgcgaaggtgccaatgtcctcatggccgacatctctgctcctgccctcgagaaagccctcgccaaagtgaaggaggttgtccccaatgccccacgggttgaaactttcaagtgcgatgtttccaaggagtccgaggtacaagcgatggtggaatctcaagacagctggggcggaactgacgtgatcttcaataacgctggtattatgcatgctgacgatgccgacgccgtggacacgccagagaagatttgggatttgacacagaacattaatgtgaagggggtgtggtttggatgcaagcacgccgtgctcagtctccgtcgtcataagaagaccaagggtagcattatcaacactgctagtgtagttgccttagtgggtagtgccactcctcagctggcttacactgccagcaagggcgcggtgctggccctgacccgtgaactagccattgtgcatgctcgggagggattccgcttcaatgcactgtgccccgccccgctaaagtacgttctgcattagcattgagcttgactgataatcatgctgacggtaacagcaccccgctcttgcaggactggctaggcgatgataagcctaagcggttccgtcgtgaggtgcatttcccgaccggacggttcggcgaggcaatcgagcaagcgcatgcagtcgttttccttgctagcgacgaaagcagcttcgtcaacggtcacgactttgttgttgacggtggaatgtcgaaggtatgtgttttgaaatcacgaacttgctcagaaggatagctaactgcatgataggcatacgtcacccccgagggaccagccacccctgctcccaagaacttgggtcactaagcccgcttgtttatggtaatgccacgattgtctatgaagttctttacttcctaatgaaatagaagttctacttgaatacctccgtccagtccatgatgtagcagttatcatccgttccggacttcatgaagtcaaattaatctgccgctagccggcttggtcatacgagacataccagaacagggcgaatcccaaaattcatgtcgcaggctccggtgacatgctccgtaagacagccctagtgtgtgcattacatggctatgcagtcccttggcataaaaaatattgacctgagatcgatccagtatatgaattcgagaacaaattaggtattattgtttaactcaatctgacatatagcaccctcttgtctcaaattcgtctatctcaattggccttcttatactttcaagtagggtgaagtatgaaatctacgcgatctcggcttcgatgatcatctcatactcttgagggtcaggccaaaagttgataatcttgaaaccagcatcggttaacagattctcccatgcatcttgcgtccgttcggaagctgacagtaacgacatcatctctacgtccattgtggtttggctgatgcttgctcctattggcggaagaacgatgtcatagatgaggagtttggagtagccttttaccatggcgtttctggtgttcacgagcagttgcttcgctttgtcatctggccagtcatggagaacggcgtgcagaaagtaagcacggctccctgcagttctagtattaataggcagacctggatttctggaccggagtgcctctcacctttcacaggttggggtaagaaaaagtcatgaaccatagccgtgatcttcttatcgacatgaacattggcaatcacctctggaagatcttgcaaaactagcgatccagcagggatgtcgggatgcttagcaaggacgtacgagatgtccgtcccggtgtttccaccaagatcaaccactaatggagaagcatcgtccagcttggcaccttcgagtagggcggttgtatcgtaaaccttagtccatggggtcttccatgccgtccaggcttccatatggccggtgaaagcttcgaaatacgcggggctttctgcaatcgcccgaagaaggtgaggccgtccggatcagagtccgtgtaattattctcattaacgtccataggctccttataggaggtcttggccagataggtcggcaagttatggccagccgcaatgtattggtatgttctgatcaagacgtcaggacagcagatggactgatggccagggaggcatgcttacgctgcttgaagagaggcgcggaccttggtgctctcgtcgccgatagcgtacgagaacgcagtcggtttgaatgtgtcttccgctgattcctcaaccacgttgaaagctgctagcaagcggaagagccgtcctgtacgccttcagtgaactttacggtaattatgctagcatgggggtgtaggcttacgcaacaggtttgtatcaacggtgggagtagtgaattctaccaactcgtggatagacttctcaccccctccagcgcttgtccaagatttccaaaggcccacgttgatgcatatctgcagagcggcaaagacaaccggatgttcgaagcagaagccccaggcgcgctcatagggtgtttccaatcgggcgagcagtcgacgtgctgcagcgcgcacttgtaggcgttccacttcggttccgccaaatgcctcaggattaattgcatccagagcagcaatagtttctaagatctgagaccgcatggtgcactttctaattttaatttcggagttcaactgaaggaattgatgacaatgttgcaccaggccagggcggacgaggtgggcgacggtatatatgggccaacagtccccatttcgcgagcagcgctagggccaaatgtcgaatctctgatgaagcccgcggggtgaacccctcagcactaacgaacaatgccccacaagacgtcaagatttcctgcgtttgacttgttagtacggaaaataattggaaaccttcttctctggacgaagttaagagagctccaggatcatcgttaagtacaattcccgaggacgggccaatgtactaatgtagtcgcttaagcccattcgggaaagatcgctgcatgtctgggccacgccaccaccagtctaggcaccggtggcagcatgcagggggtcaattcgccggatcggctgggccgcgctctgtcacttgggtcctgaataaatatgttcatcctgcaacgctacagggcaccatgccgatttcttggcgttctctaactttagatcggcagcagaaaaccatgtcgctcgaagtacaggtcatatcccccttcatactaatacattagaggtcgccatgctgtgatcctggcgtacttttgcttcggagcagtagcaggagacgatgtcgctcaatctacaggtcataaacccttctatattaatactacacgaatggctgcatcttctcgtgttgggtaggaaatctttcttccttctctcaccccaatgacctttcacttctagtcgtgaatctactgtggccatcttcgacatgagcgcatacggaggtttagggcccatgacaaatgcggtcctttgggtggaggtcgtggtctttgctgtcttcgcagggctcaggctctatacgcgaaaacaccttctgaatgcggtcggccttgatgattatctagttgtacttgcgttggtaagggaaatagccgtaacacaaatatacttgggcaaaggctgacgggcggcagattcttcacatcctttacaccatttttgtcagcatcgcaacccactacggtctagggcgactgtttgctgatgtcggtgacccggttatctattccaaagccaccatgtatgaagtgttcagccaggtggctggtatcatggtcattggtgtaggtaaaggagccgttggcaccttccttcttcgaatcgtgcgaaacaaaattcagatttggtttatctggggatgtcttgggatcaccacttttatcactctgttcgccagcatcactgttgtggtacagtgctttccagtccagaagacttggaacccaactctagaaggaacgtgttggctcgacttttctaaagtgggttacacggttggttgtgagtgctgcatgatcttggattcatgaatgaaaaagtctgactttttccagcgtggttcgtcgcggccgacttctccttcgcgattcttccatggttcatcatctgggatctcaacatgaagcaaaaggagaagatcaccgttgcctgcggtctcagccttggaatcttgtaagcttggaaaccctcactagcttggaccaaaatctgacttggagactcgagtgctggagtatgtggcatcgttcgcactgtagccctgtccggcctgaatgcatctgagtacatctgtacgttctcttcactctcgctaatatggtagagctgacccaagtcgaagatgataccgtgccaatgctcatctggtccgcaaccgaaagttgcgtgacgatcatgtgctcgtccattcccgtcctccgtcctctctacgttcgcgttaggtacggcacgaaggatgaaggcagctctggcaacacttcctacaaactgccattgtacggcagcggtcgcaagtacggcagactttcgaaatccggccttgacccttccgccgtcgaaacgatcggcggttcccttcgggcacctgctggagattatcacaaaagcaatatcagcaacgagcatatccttccgggcgctgcaggcatcgaaaggacggacgagatttcagtcagctacgaggcagtcgagaagaaagtctagagaacagctcacgttgtcgagaaggccgatcgatgtctacttgtcaaattgagccgaaaaaagagcaacctgaaacatgatgtccgagggtcgagtctgtttgattggtggaggggactaaattcatgttcagttaggtaccttagctgataactacgatgtgtcagtcaccccagacaagcgtccgaagtgtccgcggcagatccttcgtcctccattaatttcccaagctcattgaaggaggcgtgaatccctaccgcatgacttccgtatgattgcggaatgattggcagaggagtatttatccgccgatgcagactgcgtcgcgatcgagtagaccttgcgaaatgcccggaaatgagccaagtcctaagctgtttaggtacaatacttgttatgaatttcccctgctggaaaaatgaaggtttttttctttttgggtctatgcgtcccaatcggatttactattcctccctacctgtgcagtagatgtatcacacaaatatcctgaaataacaagaagggcgtcgctagtgctcactagactggatacatatccagatctctaactaaaacaatatgtaaagtgtaacattgcaaagatcgtccatgtaacctttattcaaccggaaaccacaagccgtcccaaggcccaagcccccgggccggcaattcaaggtttggaaacgtctgaacgcgctagcattatatattaaaatctgtggtttacggagtgagagttccggggaagccatccgaggctgatgaaatagtttatgtctagctcgggcctttctcaaagaaattagggctcactcggatgagcaagggatatgggaggggtgtgggtggcaatttagactacgtagacacgaagttacggcattaagtttactggggaagtttgagtaagaggtacttttgacgtgggggaagagaaagatatcggtgagaatacgaagtgacgcgggagaaatatatcttgtttggtttgacgacgagtcccttgatatgtcaatggaaatgacgatcacaaccttaatacatattacttgactagtgtacggagtataaatgttacaaagcaattgagagtttaaacatcacgtcagatatacagtgatggcgttttcaggggccttgttgtggcctttctgttggactgagtaagatcacatgaccgtgaatagatgcctttgtgcctcaggcttagagtgtatgtcctggatgtcgctgttatgattttagctactaacgatcggagcatcaggtgtaattcaagaagctgacgttatatagccagactttcttatagataatctgtgtttttatcatacagatacagtttaactcccattgaaccacaagtctaactgttaacaaggaagtcgttggcatctgccatgtagctccgagccctagaaggatctatggcgctgtgtggacccgagtagacacaaatcacgaatattcgataacatgccattgtgcgttttcagcacagctgttaattccagcatctgttaaatccgaagctaccagcacgtcgagctccagctttaaacaagggtggagccctaagcagcggcacggttccaatgatagcttcggtatgaacccactcggtgtacaccggagactggaaccaaccgaactggatccaatgacgaaatagctcgcctctcagctatgaatgaggtcatgaatgtatttgttcatgccaggcttttaaatatagctgtccattcatgtcaccctctcatggttggaattgaattcaaactacacatacacaagcatcgcaattacttcccatcacagcctcaacccatcataacggcaaaatgtcctctggcgtatccttcaaaacaagcaacggcgtcaccatcccaggcgtcggcttcggtaccttcgctaacgaaggctccaaaggcgagacgtacaaggctgtccgtcacgcgttgaaagtcggctaccgccacctcgaatgtgcctggttctatgccaatgaggacgaagtaggacaggcgattcaagatttcctgaaagagaacccgtcggttaaacgggaggatctgtttgtgacgacgaaggtgtggaaccacctgcatcggtatgacgatgttctctggtcgttggaagattcattgaagaacttgcaattgagctacgtggatctgtttctcgtgcactggcccattgccgctgagaaggatgagaagcatcagccgaagcttggtccggatggaaaggtacgttatcaatttacccagaatatgtaaacaatcactaacaatatgaatagtacatcatcctcgaagacctgacaaagaaccccgaagaaacctggcgagcaatggagaagatctacgaagacggcaaagcccgcgcaatcggcgtctctaactggcgtatcgaaggccttgagtatctcaacaagattgccaagatcaagccccaagtcaaccaaatcgagatccaccccttcctccctaataccgagctcgtcaactactgccaaaagaacggtatcgtggttgaggcttactcgccccttggatcccagaaccaggtcccgaccacgggcgagaaggtgtctgagaacccgacattaaacgaaattgccaagcagaagggctgtactttggcgcagattttgatcgcttggggattgaagagaggctatgtggttttgccgaagagctcgaaccctgcgagaattgagtcgaactttcagtcggttgagttgtcggatgaggagtttaaggctattaatgatgttgcagagggaagacatttccggtttgtgaacatgaaggatacatttggttatgataattggccggaggaggcgtgaagaatggttttagataaaagtattttagtgttagacacttttagtaatgaactgtgatgatcatatcatttactcttattactttggtaaacgggttggcaaatttgtcctatgttcttattatcaaaaagtgctctcaatactgtagatagtactctttgtggccttgcacatactgtcacgtatccgatattcctccgttgcatatggtacacatcactacatatgctaccggaaaacgactacttcgcccatcatcgtcacactttacgcttcttgcttgactattcacgacggtgctataccaacctatttccttctcgccacacctggtggcttctgtgtgctgttattgttctgaacggcctcgactgggccgcattcggagttttgaatgtgagaccaactgtttcagcttatacacacaggagataaatgcagtactaacacaagttagattgataatccatccgtcaacagaatacctcctggaccacgcgctttagacggctgtttcaggcgctatgtgttaggactggtggtttctatatcgtcgctatatcatcactgcagatcggaacacaggtcatatacgttgtcataatgcatatatttgtttatcccgtggtgattaccatgcgcagctccaacgtgtacgaagagcgaagcctagggatctacgctggagagacgactccaaaatctaatcaccaacaagaaaagccgccaaagaccgtgccctccagtcgactttactttgtcaaacagcagctccatgtccaattagcgtatgacatatggtggctcgcactagcggtgatcatcatatccattgtcaaagcgggaagtttcactcgagatccagttgtatactctgtctttaatatcatcttcgagactatcagtgcctacggatatgtgggaattaccaccgggctcccggaccaggcatatagtttctcgggtggctggtactctctgagtaaggtggttcttcgtgctgcgatgctccgcggtagacaccgtagtctaccggtggctattgataaggccatcgtgttacctggggactatctggagcgggtggaagaggaggatgcttatatccgaatggagcgctcttcggaacagggacatggcaatgtgtagtgtgggttatggaatatgaatgagaaagcttagttatgttataggagtgttggttatagcgttatctcctgcaggggtatctctttagcgtatgattgtggggatcgttaatatttatattctaagcccatcttgttcgactcattcaacggccgcaaataggctggattatagacaggatgagttaaagctcggatgacactcactatcagcttgtgcaggtctagaccaaaagtgtgaagttatgagaccggacttaggatgctgttccagatctcggtgagaccgtgtccgaagtttcgatattggctcttatcgcgttgctcactagtaagtaagccctaacaaagcacacgattttaaacaccgattgcaccattttaacgcacccaagggcttctcatcaaacactttcaacgctattctacccatacgagtcaagcagagttttgttttcgttccttggcaccccacagataccttataggcgtgcttcaatcgtccttggcgacaatcatgtattcagacgaggatggaattacctcgaaagagagccagagctagtacaacgttcgtattcgcatcctagtttctctcactacgctgctgtcatggctaggcctgggcattgcagttgcggatggtaattacccgcgagaatatctaccattcgacttctgtctaacgcaactgcattggtctacctggagcataatactgtgggcaagttgcttcccgatgaaccaatgtttctgcttcctcgggtacggctgactgacttggcgtgtagggtttgctctcattacatggactgtatctccaattgaagagggatcctgttgagatttataatgctggccttcgagggtcggcattatctgctgttattgtcctcgctgagacttttatgacatggccaagtaaagagactcgtgcagtatctggacccccaagagccttgcggctttatctcgcgacctttctgatagtcattcaaatcctctttcctcgtcgcccagctgttttcacagccgagggaaaggctgtcgatcttgaaaacagcaagtcggcctttcagaaatattcgatgcaatggtgtacaacagccctcgatattgctgggaaccatgtccctctcgatcaactccctgccctaaactttcgtagtagatcgaagagtcagccgctgatcacccttgactcctcaaagacaagcttgtggaatcatatcctcgcagaacgttattttgaaatcgcgaagcactgggctctgatgcttgcgcgatctatatttaccttcggaccatcttattgtgttatgaaacttctcaaaagttttgagaatgacgcaagtgcaaaacaagatgcctggctctggctaattggcatagggctattctctctttgtcagactatccttaattaccacctgctttggatacagtggtcagaaatggctattccggttagagcccaactgattatggctttgtttcaaaaggcattgagagtgaaggattcgaagacctccagcaaaaaggactcccagtctaagcccgacgccgtgaacctcatctcgtctgacactctttccttcagcaagttcatggctgtcaaccattatataccctcctcgtttattcggttcttcttcgccgtgttatttcttattagattacttggatggcagagcacacttgctgcgatgatagccacagtaatgagtgtaccggtacacatgtcagttatcaaacatgaacgagcggcgcgaaagaagctcgccatgacaagagacaaaaagacaaaagcaattacagaagccatgcattctctccgacagatcaaattctctgcctcggagacgcagtgggaggaacgcattgactcgtttcggctcgaggagcttaggcatcttcgcttgtgtttcaatgctagcaatatacgatccgtgtggagtgttgcatcgccgtttattattgcggcgacttcagtatgcacatacgcgtacataaagggttcgatgtccccgtcgactatctttccaatggttgaattattacctcatctccagggcacgctgggttttcttcctgttgtctttcatgattacttcagtgccaggtcgaatgcgcgccggatggaggactttctgcggagaccggagcaggagagaattctgaagcccagtccatctggctgtgtctcgttttggaaggcttccgttgcctggccgtcttatgaaattagaagtgaagctaatgaagtgaagaaggatacctcgtctcatgaatttgctcttcgcgatatagatcttgaattccctgttggtgaactcagtgtcatacatggaaagacaggttctgggaagagcttgctcctcgctgcaattatcggcgaggttgatctccttgctggtcatatcgaagcaccatcaatagcagacggacagccagtggcatttgtctctcagaccccctggcttctaaatgccacaatcaaagaaaacatactttttgggagtcctctggacgaagaaagatataaagaagtcttgaaagcctgcgcactctaccccgaccttgcggctctgccagacggggatgagactcaggtcgggttgcggggagtcaagctcagtggaggtcagcgtgccagagttgcgtttggaagggccctgtattcttcggcgcaaacaatggtcttggacgatatattctcggctctggatgcccacgtatccagggagattttcaacgcgctgacgggaaagctcgctaaaggccgcacgcggatattggccacgcatcggctttcattgtgcttatcggaggcgaggtatatggttcatgtggagaataacactatagtctatgctggtatatctgatctaaatgcaccgcagttggaattggcacaaccgggagttgatatagagcttgtaaccccggtgaatgagaagcctgacaaggactctggcgggaggaaaagagccaaggcccgtacggcacgagcagatctgaaagtatacagtagttactttactgcggcgggtggtcttgggtttaccttgatatacgttctaggtcttgttacgaagcagctcttgagtgccctgacaacttgggccttaggtcgcataaacacatctcgtccaaaggacacttcagatccactaaaggagacatcctggggtagcgcaagtcaaagcaatgacctccagcgttatctttatctatatcttttagggtcactggtgacactcggtttggagattctatacaatctacatgtatcttcagggtcactgcgtgcatcaaacgtattattccgtgagatgaccctccgagtattccgaatgcctcttctctggctcgacaccacgcccattggtgagattttgagacggttcaccgttgacgttaggaatgtggatgatcatgttctctccaccatgtccgatttcgccgacactttcatgaaactaataattgtcgtatgtgtcgggtacggattcccttggtcacaactgccttgcgttccctaacaaatatctagtctatatacatcgaagtacaccagtcttttgacaatggctcttctctactggtgctggcaggttagccagcgctatataaaagcccgtacaacagttaagggtgccgattctgagccaactgctgatatcctcgagcacttcacatcgtgcgcagctggtgtctcaactatacggtcctttggagcgacggataagcttgctgaccggatgcactaccatgttgatcagctctcaacagccaggcgtcacttctacatgttcaatcgttggcttgggctccaaatgtcacttgtgggtattttgtttactacaggaacgggcatagtgctgctttcgtcgggctcggttatcgacgcctcggtggttggattctctttgacgttctccatgggattttcgcaagcgatatttaaggccatcaatacattcggaatgctcgagacatacatgaacgcagctgggggagtcgtggcgtactcagaactgaatacggaaaatcaaggaggcaacgaggttccagacgactggccatcccaaggagcggttgagatgaaggatctcaatgttgcatactcgcctgatctccccctcgctctgaaaggtgcctcctttactgtccaagctggcaaaagagttggaatcgtgggccgtacaggagctggaaagtcatctttgactctttctctactgcgcttgatcgagccacagaccgggtcaattctaattgatggaattgacatatccacaattaggttgaactctctacggtccagaattgcttttatccctcaagacccggttctattttccggcacggtacgatcaaacctggattacttccaacagataccggacaaggacctcgaagacgctctacggcgtgtaaagctacttgcagagaaatctagtggtagcgatggattattcacactcgactctcccatcagcacaggtggatcgaacatgtctcaaggccaaaggcaattgctttgtctggcacggattctggtcagaaatcccaagattatcatcctcgatgaagcgacatctgctgttgataacaggacggatctgtggatccaggatacgattagaacccaatttaaggggaccttgattgttgtggctcatcgcttgaggacgattgcgtctttcgataaggtggttgtaatgaaggatggccacgtcgcggaggttggcgtgccagctgagcttttggaaaccaaggggctgttctatgacctggttcagaagagcgatgatagggagttgttggctagtattataatagcgggagagaggaagttggtctgattgtaactggttgaacacgacttctctactgccatagcttgaactgatagctaggccgaatgaagcagcgtcaacatattgccctggtgaatctgatatacaatcaacatctcgtcacgtttggctcttcgtttataaattcaccaagcgcaacacttcataaaccttgcagtcctccataaaaccctcacatttctgttcctaccgagtctcatataagaagatagcagaaaaggtctaccgccatggcatcctcccaattcatagacctcaatagtcagcctatactcgagagcgaagtcttaggttacggagagtcgggggtggtgattcaccgtgacagcatggctatcaagacgccattgagacatccttggaataatgaggtcccgcattgcaataaatactgtagacttctgactgaatcccatagagggtgagatagttttaagactcgttgatagccagggcacgttaaccctacatatcgcgccattcaagcagacatgtagttaagcaataaccctcaacgcacaaagtcataccatgctgatcatatattcagtaaagtccaaatacgaccctaaacatcgccaacccctcaacgataataaaaccacgtctccccactactcttatacacctcgcccccgttgccatagtcgatatccagactcgaacacaacgtaaacccctgaccctccagacactgaagcacatccagtatggccactctactcagcactgctccttcctccgaatacttggcccataacttgctttggaatttcacctcaaacgcgccggtcacaaggtcctgattacagtttttaatcctgtccccgaagactgcaaccagggataaggctaactcggggggagcgttgataaggtgcatgaggtcgtcggagtcaaaggagatacacatccaggagagttgctggggggcctggcgtttgaaaatcaggctatctgtgctttgtcagtctgatctgctaatggatttgggatgggagcagaagaaacagaaaataaaatggagccctaataaattataaaaagaaacatacccttctgcccaagcgacttataattccctatcctccccaagcccccggcagcagggtgtacaccccaaccttctcttgccaacgcatccagaagccctaatatggcattacgaagcgcaaccttttcatcgtcgtcgccatgttcgaacggatttccccgtagcttgaactctgtactctcgtagtatgcctttactttctgtatccccttgggccaatgtctctgaagtgtctctgatacaagcgctacgatggactccggaaagcgcatgaggcgaacgcggtcgtaccctgagaaagaaatcaacccgtatttcgatcgtgtatcctcatcctgtaactgtgtcttgttgtcgccaggaatggcggttgagctggagcctgtggtctcctcgtaggctgggggttcgtcgcgcattctggagcaggtcattgtcagatttctggaatgggtattgattactagtagtacactttgtgagaagtgcttgtgctgacgtaagtctatcagtctagagaagcataggtggagaaatagggcaggaaggggtgttatggttttatattcgctgaggtaagtccccttcaccttgtagattaagtctaataccctgttgcctgatgttggtacggtaaggctaaagcgctacaaccatagattgcgactcgtatagcccatattacagggtgagaaaccggccaatgtgagctacgggatgagactgcgccacttcgggcactggccaactgcatcttattcgtcatgatccatgcatgcaggatttcactgtatgtctggcatggatgacaaggctgggcgaagtgatgtcacgaaacgccacgaggtaatttgtggcttatcttttaggtccctttggtcaaatcgaatttgtccacatgatactgatagtggctggcgttggtttgagtataccaaaaggacctatcatgatgagcacctattgtgctagatactagggcttgttgtatgtatgcgggtaggcattccatcttgatgtggtatcatgtttgccctaactctctggattcagtccaagaggcgtcttggtgcaaatcattgctcaatgtgtagtaagtcacgatgtttcaagtcgactaatggcagtactttagcacgatctcaatacaaggatctaagatcagcaattcactgtgttggatgagcaaacgttataacgttatccgactatggtcgacagatgaaatgaccgcccctcaataggcgtggggaaacctagatatcgcatacatgtacaaggcatagagatggaccacggtggtgcaattaagtctgagatcaatagttatctatggaaagcgaaccgccgaaatgaattaagcaaaaacaaaagcaaacgccaagccgtctatcgtaatgaccaaaacaggcaaatcatcacgctgctcatgcagcgaacaaagtccagaaaaatggtataaacaacgaatatttactaagcctcatcatcagtgtccggaggcctgggggtacccttggggctattgagccactcaaggtgacggagacgacgacgagtctcccgctccttgagctgggcacgggtcatcttcttcttctttcgcgccttgaacttgagttctccctgttcttcggcgccagagttcacggcggaagcagcagcagaagcagcagcagaagcagccgcgctggtggccgtagagttcacagcggtgccggtctggggcgagttggccgcactgtcttcgaaccgatcgagcgacacgcccgtgttggtacgggcaacaatgcgcccatcagcgacgtgaagctgttcggggcagagcgcgcccacaaattcctcgttgtgagaaatcatgactacaccacccttgaagtcgcggatggccacagccaaaccacccaaagagtcacggtccaagaagttggtgggttcgtccagcacaagcaaatgagggttgttccacatggctccggccaacacaaccttgaccttttgaccaccagaaaggccagagatttggttgtgattggcaatctcaggatccaaaccaacgtcctcgaagtgcttcgagatctcgggaggttccaagtttctgaatccgagaccttcacgagaagcctcatgatcatcgaattcctgaaccagcttgaagaatccaagttcaagcagggtctcacgggagatcatggtgttgtgcttgggaaggagaccaatccatttgctatggtttctgttagcggtggcgcgcggagactagtaggcagcgataacttacacttcgtactggaaggacttcttccacttttgtcgacccataagggcctcaatgcgacgggggcccctgccatccttgagatcgaccggcttctccagctgagccttatcttcttcggtaaggatccgggtctgcttcaagtacacttcgcggtcatcaccgttagcataacgccactggaggtactggctgggggtcttctccagatgcatctccacgtgctcgagagcgtgctgcttaatataaccgatacgaaggttggggtgtttctcaactttgccggtttgcgggatggtctctccggtaagcatcttgatgaaagtagatttaccagcaccgtttcctccaatgatagcaacacgggaagacagtgttagggtgagcgatgcgtcagtcagggatggcttagaggcaccgggataggtgtaggaacagttggtcatccggaggatggcacgggtctgggacttaataccggacagaataccagggggagggaacttgaactgaacagcgctggcagacaaggtgtaatagctctttgcctcgggcttctgcttgacgaaagcagccagattacccttgtagcagacgagcttcttgttttcatagtggtaaatgtccgtgcagacttcgtccaagaatccagagtcgtgactgacaatcaaactggtgatctcagtgtgcttcttcaggtattcctgcaaccacttcacattggcaacatccaagtggttagtcggttcgtccagaagtagaacatccgccttcatgagcatggcacgggccaacgcaagcttcatcttccaaccaccagacagcgatccaacacgttgcgactggcgaccctcagggccatcggtgaagccgaattcgagaagcacctgactgatgtgctcctggccagcctctgcaatcttggggtctttggagacgtattcgatgatgctcaggtcggcatcctcgccctggttatgctcgacaaagcaggtacgaacaacatcctgcggggggaagccctccagcttctcgttggcgatactgcgcatgagagtagacttgccagctccattgcgaccacaaagaccataccggtgacccttcagcaaacgcaggttggtatggttgagaagaagcattccaccgtaggcgagggaaaagttggcgttgacaatctcgacctcattgggatcatcgggttcgggcttgccaaacttgcggtgatcttcctcgatgaaatgtgcctgaagagcggaggcgacagcgtcgtgcttatcctccggtagcaaaccacgcaggtagggggcgacacagattggaatacggtcgtgcatgcggcagttcacatcttcacggaccatctccgcgatgtaagtcttaccgagctcgaaaagcgtatgcgcctcgggcacagcaaggccgccgttggcctgaatctgagcatccaagacggcgagaacctcatccggagtggtcttggtgacagatccagcgtgaacattgctgtcgctcatggccttctccatcacgctcaaggcgcgggtggcaagctctcgaacttccgggagggaagcacgatccttgacagcctgtacaccggggatgagcttgggcaagaaggtacgtgcctcggagggatcatgcacgagttttgtcagattctccacaaccacgacagtgcgacgcaaagtctcttggggtgttgtcggggcgttcagcgagcgttccagcaatggagtgagcaaggccagaacgggagaggtaacaatggcgacaaaagtggtttgcgacaaggcatggatggcatcctgtagtgtcttctcggacggctgctccatggtcttgatcaaaagagggatacgaggggcaacatcatcgttggacaacagagtggtaaccgcgttcatggccttgcaagcccgcttagccacttcagcctttagatcgtgcatgccggactccaccagaggaatcaagtctttcagagtcttgcccatcgcctcgcgcagtatatccttctcacgctcttcttccatggttccgttacccatctgcgctttgacggccatcttctcaatgagggagtatgcgccgacaaagccctgccacttaccggtgccgcgactgagataagcagacagggcaggaaggaggccattggccatcgattcgggcttgaggccagcaaacaaggcatcgattgcatactgagcggcgtcgcgaaccactgcgcccttgtcggccaacgcatcgagggcaatatcaagcacgccgccgtcttggaggaggaatatgacttcgctcagagggtgttcgcgggggaaacgttcgaacagagcgccgatgatcagcatggcactctcacggcgggcgccattcttcttatcgctcgccgccttcttgacttgcgacaagacgtcgtatttttgaaagccgagacagccgacactttgaatcaacaaattggtcaaggcgtaggatgcatcgagagactgctgagaggtctctgcggtaaagatggtgttaaaaagggacgagatctcctctggggtgggagggacggtagatggggtcttggaaacagcggtagccatggtggtaggttcggaatgaggcattctctggtatatagggcgatcttaaatgcagtgcgtctctcgccggagtgtgttctttcgcttcaacctttgcgctaagtcggtaagccactaaagcggcgtcgtcggagcctggtggaaaattgaaaataccacaaaggagaaatgaaaagtacagaaaagaaatctacacaaaattcaaaactttttgaagaaaatccaaacgtcagatcggcctctggacgaggatccgtcttcaacacaaacaacagggtatatgaacaagagaaaggaaagaggggagagtgaagagacaagagggaaaggaaaaaatccaggctgaactggaaagaaagatcactgataatgatggcggggcggcgattatttttttttgggccgctgataagttcctttgtgattgggcgcgggtaaaaatctctgcctgaggcgcaggggagcaggattttcaccaatcagaatacaccgcctttgcgtgggccctgattgttggctcagccccggtgggtgctgggtgcctgaggcatggatggcttgtattggtctggccaggtgccgtatgtggcggtgctggcttggcgttcatgcctcaggcttaaagaactttcaccccgaggaaggctaatccacatcgggattaccccgcacgccggatccgccaacccgcggatatcgtgacggggacggagtctctcatccaaacaatcaatctgaatacatggagaggagtagccgattttatatcccttgctgttgcgttatggaacacttctatagagctcttcttgatcgatgtagttcgcacgtctatcctaacccacatacagtggattaaacaatcatcccgtctgccgatgatcgactatcagcttatcccgaagcatatggtccatcacatccctttggaggaatacccgaccctcggtaacaacaacaaaaacaaatattcataggggtcaagaatatagaaaaattatgtctctttattccctataaaagatatagtagcagagccatactagcaattacatccttccatccgaccgtgagagagaagtggtgtgattagacccttagaaaagaatgatgggtgttggttggacactccgcatgcagccgttggattgcctcggtaccttcctgtcaccttcaccgttcctccgcggccaaccgggcgttcaaatcggtctggcgtgcaagggggccctcggcgtataattcgtgctccctcctttcgctgttttcttctctttcttgtgtaccttcactctaaatttaaaaactcccatcgtcctccccgctagacttcgacacaaagcagtgctcctgtgttgagtgtaattctacgggccttttctccaccatcaataaataaaacacaccatggccatgcccatgcgaaccactcgccatgctaccaagctggctcaggttagttcccgatcgtaactggtatcaccctaatgcaaagactaaatctagccattgtgacagtcttcgcgcctattggctcagtatacctctcgcagatcttatgcgacggcggaacccgatctgaagtccgccctcaaggcggtcatccccgccaaacgtgaactcttccagcaggtgaaacaacagggtgacgatgtgattggtgaggtcaaagttgccaatgtcattggtggtatgcgtggtctcaagtcgatgctctgggagggctcggtccttgatcccgatgaggggatccgcttccacggcaagaccatcaaggattgtcagaaggagctccctaagggtacctccggtaccgagatgttgcccgaagccatgttctggctcctcctgacgggacaggtcccctcgaccagccaggtgcgcgccttctcgcgcgaattggccgagaagtcccacctccctcagcacatcctggacctcattaagtccttcccccgcaacatgcaccccatgacacagctgtcgatcgccgtcgctgctctgaacactgagtcgcagttcgccaaggcctacgagaagggcctgaacaaggccgattactgggagcccacattcgacgacagcatctcgttgctggccaagattccccgtgtcgccgcattggtcttccgccccgaggagatcgacgctgttggcacccaagctctcgacgtgagccaggattggtcttacaacttcgcagagctactcggcaaaggtggtcaacagaaccaggacttccacgatttgctgcgtctgtacttggccctgcacggtgaccacgagggcggtaacgtgtctgcccacgctacccacttggttggaagcgccctgagcgaccccttcctgagctacagtgcgggtcttttgggtcttgccggacctctgcacggccttgctgcccaggaagtcctgcggtggatcctgtccatgcaggagaagatcggaaccaagttcactgacgaggacgttcgtacctacctctgggacactctgaagtcgggccgtgtcgtccctggctacggccatggtgtcctccgcaagcctgaccctcgtttcgaggctctcatggactttgctgccactcgccctgatgtcctggccaaccctgtcttccaattggtcaagaagaattccgagatcgcccctggtgttcttacggaacatggaaaggtaaataattgtctcggccttttccaagctacctgtgctaacgatactagaccaagaacccccaccccaatgttgacgccgcgtctggtgttctcttctaccactacggattccagcagcccctctactacaccgtcaccttcggtgtcagccgtgctctgggccctctcgtccagctcatctgggaccgtgccctcggcctgcccatcgagcgtcctaagagcattaacctcctgggcctgaagaaatgattgacgaaatccaatccctgcctgtaaaaaatgtttgaatgatagcgtattttgatatccgcaatgaacgtgtgctgtttctttgttgaaggttaacctttgttctcttgcttgctggggttgatatccctgcatctagccatatgcccatttgcatagacgccagatagactttagagaatagaactatatcagattttcttacctcgatttttttgattcgcttctcatccgtgttgacgcggcttcgcgtatagaggctaaccgtccttgccataaacgtttcgtcgtgtgcaagggcatttactgatacttctagcccgagtactgaccaagttacgatttctgaacaagagctttctagaacttcctcaattcgttgtttgctgagtaatctatataatataactatgtggactaaaagagtcgtgaaatcaattgtacatcaatatatatgtttatctatccaggcatcaaggcaccactttaggttcagaaactactatatattcttcaagatagaaaaacactccaaactcacacataaatcattaaagggcgttcatactttattctagctaaagcttggttccaaggaaatgatcttacttggtagaatttgacgaggactgatggggatacctgaacaggcgctcagtcagtactattgagttttatcaaacaactaacttacacccccagcttgaagaaattcggttggaacaacaggcaaataataataataattgtgatgatactggcaatacatacacatgatgcagcaatagaaaattgtctgacagtgcaacacgagacaaccccggtgatacagtcatgttctcaatagcaccagggtcatcctttcccagtttaattcacatttcacgaagagacattctggaacggcatagttacagagcttatgcgttcattcctgtccgccgatcagtgacagctatactcttctgtgtcggccttttattgatgggcctaagggtgaggcgatttgagaaatggtaggatggttgatcgaagagaccattgggtttcaagctatcaccaagtgcggtcgcgagcaggaaagttgcgacgaagcgtagaggtggctactggggtatcctgcccagtactactatcttgtcctatgttagcaggaccggaatagtggatttggttgaggtttcccttgacgatgaagagataccggttcaagtcccagtactcggtagtatactaaaagctgggactcctatgggcatcaaacactcagcgattcccaaacgccagactctaagccagtcagcgcccatagtggtagtcgccggtaccgcgtcaaacaccgggaaaaccacaacagttcgaaatataatccaacatcctaagtccggaggactccgagtagccggcgccaaatcatctggagtggctcttttgaacgaactgcgttgtttgtctgccacaggggctgagctagttctaggtttcgcagatggttggttacccacaacttgcggtaacctaaatgagatagttgaggtgtcgctgggcatcctgcatgaattgaacaaaatggactcttgatgttattgttgtcgagtttgggtcgtgtctccttggtttctacaacatcatgcccgttttggacccaccgcagttccggcagcatgtcgtgtccgttcgtactaacagctagtgatactgttgcggcttagggcttgaaacgtctgatggaggagcacaacattgatattactctgatcacagttcctgttgtgaacaacattacttatgtggcctacatcgagaaggaattggacttaccgacttagagcaacatggggggctatatcgaagacgttcagttaataaatatgaggctcaatgatattgaaagcaagagggctaaacagatacgatgatgtaatagcaacttatcacccaatgttaagccagttgttcttgctaagcagtcaccattagggagaatcttcataggcactcttaggacgccactgtttcaggcatttttatactacaatgtgattgattgtaccttagaagccattgacgcacataataacattccatttctcaaagatatcgggagatgttactccatatgtcttctttgtttgttgacaataatgatgggtggatgtagtccacaccctgtttagccatcgtttcacaaatgtgtccccggttagggcttccgctggttcacattattaagggattcattgaatgaagctagtgaaaccctacctatcgtacgaaggctttacatagaggaggctgagagtgaatatgtagaatatactaaattgcagggcgcccaaaatagcccagtgggaattggtggactattgttcttgagctagggaatgtgactatccatcctaaatagctgccaaattcactacaaggaggtagtctctgttacggatacgccgtagtccatctgcttaatagttgatatggttttctaataataaaaaagtagttaatcttctaaaggtctagcgattctaactaactatctaagaatatacttaatagataacctaatatataacaacataccagtcaagaaaaatattaatattctcgttgacagatacacaatatattataaagtattaatcttattaacacttatatttcttaattagttctagtatatttatatctatatctttaacccatttattataatcgggactgtggtctgtatatcgaaccaagtattatataaagtaagatctataacctttccaagtaatccgcttgttaataattcggttgattttaaactaattattatagactagactagatactgcaaagcggtctctatcgacttaattattaaattagtgttacagacccttgtctagcgcaccttatcgaaggcggacacacaaggcagaataacgataggatgacgatggccgattcctgagtggaaggcacccgacgaatcgtttatctagtagttattcggaaagggctacggacgccgataccagctaccacaacaaagtcacgtgcatcgtagcagtgacacgaccaaacgtatcagcgacacgacaagctcgtagcactgacaagatacatcgtatcactgacacgaagagtcgtagcagtgacacgacgggcaaggatatataaggacactcatttatgtacttaagtttagttcttcgtgatcaatacacatggttactacagagttacctttagtagcaagaccagtctcaactcgttcgcactcttctaactattaagtatacgtacttaataggcctggccctttggactcgagtctagtatcgacggcagtcttgtgtcgactgcatccctgtgacgacggcagtctagtatcgacggcagtctagtgtcgacggaagcctcataacgactcccgtcttccccagaccgcaacccaacagcgacggaggtcaaagaacgacttcaggttagtaaccctcgaaacgtggtccgctaactggtctcagacttgacgacgaagccccgggcgtaacacattgatcaccagtctatacgagttgaaccacgtttggacttaaaacatcgacaaacatgtcttctcagtcatccagcagcaagaagactccggtcaagaacactccaccggcagaaactgattccgagagcgaaacgaccgtgaaagaacagctgaagcaaatgaagaacatgattactcagcttgtcaacaacgccaaggagaagaatcaggaaatcgaaaatctcaaagtacagctcggagaagctgaacgaatccgaagtgagcaacaggatcacattgctcaacttgatgctcaggttggggcatcagcacctaaggacgcaatcggaaaagtgaaactgccaaaagccgagccttttgacggaactcgctcaaaattgcaagcatttctgacgcagatgaatatgcacattcacgcgaataggaaaaacctcatcgacgaagctgacaaggtcatcttcatatccactcacttacgtggagcagcatggaactggttcgaaccgtatatccgagaatattacgaagtcgtgccagacaattggtcaaacaccacaagagagttgttcaccgactcgggaaatctgcgcaaacatcttgaacgaactttcggggatgtcgatgccgaagcggtagcagaacgcaaactaaagcagctatatcagcgaggcagtgcatcaacctatgcggcagaatttcagcagatcatatccaggatggactggaacgaaaaggtctatgtgtcaaccttcatcagcggtctcaaaggacacgtaaaggatgagttcgcacggatcgatagaccagcaacacttaacgaggcaatcgactttgccgttaaggtggataatcgctaccacgaacgactcatggaaaaacgggataacgaagcctggagaaaaggcagtcaccgaccgaagggacagtacaaatcgaacgatcagcgagaacgcacaggcgccaagcacaacgacccttacggattgaaacccatggagttagacgccactgagggacagagccaatcgagaggcatctcccaaaaggaacgagagcgtcgaaaacgcgaaaaactttgttacaactgcggaaaagcaggacacatgtcgaaggactgtcgacagaaaagaaatagtcatcagtcaaatcgaaaacctcagcaaatgaatgctacggaagacgaagcagaaccaccaaggaaggcaaggttcgcgcaactcaacgccaatgcggaagccgataagccacacgaccaggctaggggagcttactgcaccaccggaatcaagagtccaatcatggatgagatcggtgaagaaatcgaagccatacagctcaatgccaacatggatttgtcggcaagagagacagaacgatatcgagaaaacgaaccaaatgacgacgactggatcacactggattggcttaccactcataccaatcagaccatatggccacgcatcgaccaggattggagtaacctacaggaggccacagaacaatggtacggtcaacttaacgaacacgaaattgacgaattagccgaccatgcaaacgatgaaaccgacagacttggacaagtcaacagcgaatcacagtatgaggctatcatggaaccaatcagaagacgcgtaaggtacgcgctgactcatagggtggacggccctgataataccgatcaatacaacgagcctgtttcaagcatcgaccaatcaaatcgagttttggttgaaatcgatcccttgaacgaagagtacggtactcaatggattggccatgatcccaacatggagggactccttgaggtacccgagacgccagaaaatccccaagatgaagacgagaatgcacaccgacgagttatggcactcatcgacacactgcaggaagtggtgtcaccaaggcgaagggcgccagcatcgaggccatatcaaacgcagcaaatcgaggttgagccaccgcgaaggcaagagacccttaccaattggaccaacaacgtaatcgacgaaattatacggaatcctaggagattctcacggccacttaggatgttattggagcaatgcccacattggaatcacgaatgctgggactcgaacatcgaaaattgggacgagcattgtcagcagtgtaacaagcatccaatcgtatgcgaaatatgtggcgcagacagattcgagtattacggggaactcgaactcatcaacccagatagagcaaaaaggggacacgaaggaacgcatcattggttgagggaatgcgaatgttgccattacgcgacagaaccaatgcataatcgttacccttgggtagtgtgctttgatgacagctgcacacaccaccgtatctggaaacagatagcacgtttttggccacagaacgatgcaaatcgaggaacacttgccgcgaccaggcaaggaagacacatcaccacgaccatcgctatcaacggaaaaccagcgcgagcgatgatagactcaggcgcaacgaacaacttcatgtcaccaagatatcgagaaaacatgaagatcgaaggacgacaaaaggagaacgtcgaacctttactcggactagacggccagaaactgggaactggtcaagtctcggtcgaaacagtacctgttactatggctgtagggcaacacgtcgaaagtatagcctttgacgtcacgcctttagggaacaagtacgatgtggtgttagggatctcatggctcgaagatcataacccaacgatagattggaagcaacggacgctccatctgaacaattgccattgcccaaagggaccatgtatggggtatggaacccgcaccctcaccagcaagtgcactggtagtggaaggatcgaacggcgcgatcagaataccgcgaagggaaattccgcgaagaacatgattatggcagcgacccgatattcagaaaaggaatggttagctgaactgatgggatgggcacccactaacgagcaggaacgactagaagtcatgacgctagaaagcggatcggaagaggaatggcactcttcaccagaaacaaatcagacatcgtcagagtcagacagcgactcttggacacttttggactctcaggaattagcggctaactccgcggagcagccaagcctgcccaaagagtatcagggattccgagaactattcgaacagccacgaacgaacaagttaccagagcacggaccgcacgatcacactatccctattcaggaagggaaggaggtaacatgcaaacgaatttacccaatgtcggaaagagaatcacaagctctgaaggaatacatcaaagacagactcgaaaagaaacaaattcgactatcgaaaagtccagcaggacacggtgtattattcgtacccaagaagggaggggaattacgactatgcattgactaccgaccactgaatgacattacggtcaaggacagacacccattaccgctcattacagaaatacaagataagataagaggagcaaaatggtttacgaaactcgatattacagatgcataccaccgcctcagaatcgcggaaggcgaagaatggaaaactgcatttcgaacaaaatatggacattacgaatacttggttatgccttttgggctcaccaacgcaccagcatcgtttcagaggttcatcaatgaagcactaggagaaatcctcgatgtattcgtcatcgcatatctagacgacatcctaatcttctcgcacagcctcgaagaacacgttcaacacgtccaaacagttttggagaagctacagagagcagaagtacgactcaaattgaaaaaatgtgaattccacgtccaagaaaccgagtttttaggacactggatatccaccgagggaatacaagcggaggaaggaaaggtgaaagctatccgagaatggccagaaccaaccaacctcaaggaactgcaacagttcatcggattgctgaactattatcggaagttcatcgatcgatacgcgcataggctagcaccactctttgacttactcaagaaatcaaagcaatgggaatggacaaacgagcaccaaagcgcattcgacaaagcgaaagaagcaatcaccactgcaccaatcttggcacagcatgatccagctaagcagaccatcattgaaaccgacgcatctgactatgcgattggcgcacgaatggtacaagcgggaccagacggaaagctacgaccaatagcattcgaatctaggaaactagttcaagcggaactgaactacgacatccacgacaaggaattgttggctatagtgtcagcgttcaaaaaatggagggtttacctagaaggagcacaacaccagatcattgtgaaatcggatcataaaaacctgacgtacttcacaaccacgaaggagctcacacgaagacaagcgagatgggctgaaacactatcacaatatgactttaggattgaacactgcaagggatcagaaaacggtcaagccgatgccttgagccgaaggcctgatcatgagatcaaaggaaaaacaatcgagactgcaatattgaaacagcatgaggacggatcgatcggatataataagcagacactcgcagcagtaactgtggaaatcaaggaccctactcgacacctcatcgcgaaagcaaacaaaaaagacgaagcactcacacagaaactcgaagcaagcgacgacctgttcaccaaagacgaagatggaatcgtatactaccgaaacctcatttgggttcctcagaaactacggaacatgattattcaggaacaccatgacaacccgacacgaggacactttggagtcgagaaaacatcggaacagatcgcaaggaactactatttcccaaacatggcaaaacaagtcaggaaatatatcgacaaatgcgaaacatgcatcagagacaagccagcaagacacaaaccatatggacttatgcaatcaccagacgcaccttcgagaccctgggaatggatcacaatcgactttgtgggaccactacctgaatcggaaggatgggacatgataacggtgataacagaccgactcaccaaatacattcatttggtaccaagcaaatcaacactcgatgcagtgcacctcgcacacttactcgtcaatcacgtctttgttcatcatggaatgccaaaaaagatcacatcggatcgagacaagttattcacatcgaagttttggcaatcactcacagacctaatggggatagatcagaagttaaccacggcatatcacccacaaggaaatggtcagacggaaagaacaaaccagacgatcgaacaatatttgcgacactacgtcaattatcaacaggatgattgggcaaacctgttaccaacagcacagttcgcatacaataacgcggaacattcgacaataggaacaacacccttttacgcaaatcacgggtaccacgctaaagtggcaggtgagccaagaaataaacaacctgtcgcagaagaagcgatcgaaacagtcgaaggattgaaaagcttgcacaatcaattatccttggacatcaagttctttaaccatcgcgcggcaatgtactacaaccgacaccacgaaaagggacctacctttaagaagggggagaaagtattcctactccgcagaaatatcaaaacgaagagaccaagttcgaaactcgaccatcagaaaatcggaccattcagagtcgaagaacaaattggcaacgtcaactatcgattaaaactaccagactcgatgaaaaagatacaccccgtgtttcatatctcgttattggaacctgcaccagaaaatgccaaaatcgctgaaaacatcgaactcgacgaagaaggaacggaatacgaagtcgaaaaaatactaaaacataagcgagtcaatgggaaaccgcactacctggtgaagtggaagggttacagtacctcagaaaactcatgggagcctatcgagaatttgacgggctgccaccagctggttcgacagtaccaccagcggaaggatcaaaattcacccagaaggaagggtcatccatcagctgagtcaagctaggatctaacccggaaaccgcggctagttgaacatcaccacttgacgcactagccccggaacaggaaaccgcagtttcctgatggtgcaacttctcctgcgcctcacgctctttttgctcttgacgctcaagttcctcgagttcctcaatttctttaatatcacgcgcaatgaaatcacctgcacgtttttgcaataaccgtttttgttttcgcaaacgaagaagcttcgccaaaataacctcctcctcctcctcaatagtattctgggctttcacgagccgtttccactcagcatcagaaaaggaaggttcggacattttgcaagaggcaccgttcgctttcacacactcgctacaacgaccagaattttcggatttaatacaagaacgatgaaggcggatacaacgttcgcaagggaataccgcctgaaacccctcgtcttcgattcgctggtaaagcttggatttacggacagaactggaaggcatggtcaggacatgggtaaaagaaaaagttgaggatgggcatctctcacctgggcaagaccgcaactttatgctttcgaggacgaaagcctgaaagaggggggatgatgttacagacccttgtctagcgcaccttatcgaaggcggacacacaaggcagaataacgataggatgacgatggccgattcctgagtggaaggcacccgacgaatcgtttatctagtagttattcggaaagggctacggacgccgataccagctaccacaacaaagtcacgtgcatcgtagcagtgacacgaccaaacgtatcagcgacacgacaagctcgtagcactgacaagatacatcgtatcactgacacgaagagtcgtagcagtgacacgacgggcaaggatatataaggacactcatttatgtacttaagtttagttcttcgtgatcaatacacatggttactacagagttacctttagtagcaagaccagtctcaactcgttcgcactcttctaactattaagtatacgtacttaataggcctggccctttggactcgagtctagtatcgacggcagtcttgtgtcgactgcatccctgtgacgacggcagtctagtatcgacggcagtctagtgtcgacggaagcctcataacgactcccgtcttccccagaccgcaacccaacagcgacggaggtcaaagaacgacttcaggttagtaaccctcgaaacgtggtccgctaactggtctcagacttgacgacgaagccccgggcgtaacaattagtcgacggattagttatttaatttatccgtttaataatcaatttggtcggtagatagattattaacttaattaaagacaatataattggtatcacaagtatatagctcgagctgagtaacagagagaacattatatatattctatatagatagtaaatcaatacggtacgcgtgtcgaccaattttctgcagcatagtgtagaatcctatatattattataaaaatttcggactaactattttagttatagataaagcgtaacctttgtacagcttaacaaatactttatctctagatttaaataatattagtcgatgctactaattataatactattttattctcattaatatatacttcagagcttcttctatatctagttgtagattaatatagtctcggtatataagttctttaaaaagattctatagttatttaaaatcaattccaaataataaccaaactggagtctccttggttgaagcgttcgataatatattaagtatagatataataacaagtagttaaaataactataacaaaccttatataacggtataatagattataatctttataatctaaattattcgtttagacatactgtcggtctagaaataataacttatcaagtagtactaggcgataccaagttttaagaatagacctttttatataccgcttgtaaagcgagaatcttaattagatataaaagttctcggcaaactccagtcgtgttcttaaaagtagatcagcaactgctttttctatttaattaatttccaggttaatttaccgggtaaaagcctaatacgcttagtaaacttattaacaaaaataagtatttaatcaaaatcctatttagtggataaaaccacgatgaagtcgagagtaatagtataaaatagttctagtgatacgacgatcggttgtaactaactataaaatagatattaatatagtttattaagtaaatagatagaacaacgagcaatatagtttctaaatagtcgataattttaatagatagctatattattaagtatattaagatatttatcgagtccctagtagttccaattgttataaatagacttgaaaagttccgatattattagatagagtagatagatctataagtccttatagatatattcggtactcgatatatattattgttttataaaaagaattcctttattatcaagttagtagagtaaggtagcctctatatcagaccgtaaaacgttaataatatattacactcgagaatctttagcatagttctcttaaagtcaatccttaaaattgcttactaacaacactattaaatctatataaacagctataccgagctaaaacgcttagctggtaaatatactattgagattaatattataattaatagatatattgctaattataggaagataagataagatatcaacaacaacattgattttattggattaataaataattattacatagaactattagatatagtaaaatatataaactagtcgtaaattaagcttgttagtaataactatattcagtaatagttgtctagcaatattaattgttaactaataattgatataaataacaattagattaactacatccttaacaaaatattagattttctaaagtatctatataaaataagatatctctaatttagtaaatcaatatcaagacttaatagttataaagattcgacttagaaaaagtactggttgtacggtaatatagactaatagtatctttatatctagatgtatatacgtatcggcgaggtaatatactattatactatagtctttctgtaatgtgtccagatcgacgtatagttgttaataacaattataatatattaaaaactttttattgtaaaacttctcttataatatattaaatacttatcgtttctaattagtaagattgttgtaaaatatagtagtgatatatctgtttcagttagtaaataaattctttaaagtacctttcaataatacggttttacgggcttataaaggctcgattttagcggtaaaataattaatataattataaaatcaactagttaaattaatataatacttaaaattctttaaaattaacgaaaactttaataattggatgacttttaatttatcttacagggtgtataatctaaaagcatcaacttattaattaaatagttgaatcgatagaaaattaataaatacttttttaggtactagcttaaaatatagcttaagaagttttttaaaaactagttttaagtagtagcaatattctttgaatgttcataaaataataaggatattgtcgacatatactcgacaaaatctaaataaatccttaagatataactccatctaacattgaataaataatatactgttgataaaatctataattataatattaaaaatctcttatccataatagctaataattgctaggcaatcgcgatagttacgttttatcaactattaataaaatatttaacaagtattaaatatagttataaagaaatagtctttaactaaaataattatattatcgatagagggtatcgggtatatattaagtattgattccttattagcatcttttagatcgataaccatataactttttaaaataaaactatctagtatctatacatccttgtatataataaagataaggtaattagctggaatacggttggtcgcgtagattagtgttacagacccttgtctagcgcaccttatcgaaggcggacacacaaggcagaataacgataggatgacgatggccgattcctgagtggaaggcacccgacgaatcgtttatctagtagttattcggaaagggctacggacgccgataccagctaccacaacaaagtcacgtgcatcgtagcagtgacacgaccaaacgtatcagcgacacgacaagctcgtagcactgacaagatacatcgtatcactgacacgaagagtcgtagcagtgacacgacgggcaaggatatataaggacactcatttatgtacttaagtttagttcttcgtgatcaatacacatggttactacagagttacctttagtagcaagaccagtctcaactcgttcgcactcttctaactattaagtatacgtacttaataggcctggccctttggactcgagtctagtatcgacggcagtcttgtgtcgactgcatccctgtgacgacggcagtctagtatcgacggcagtctagtgtcgacggaagcctcataacgactcccgtcttccccagaccgcaacccaacagcgacggaggtcaaagaacgacttcaggttagtaaccctcgaaacgtggtccgctaactggtctcagacttgacgacgaagccccgggcgtaacaattagcttaccctagttatagagaaaattaaatgttttattaataactttataattctttaaacttaaacgataaacctgtagttttggaatatattatttctaaccaggctttatagatacttgtaactattaattcttaagaatattgataatattaacattagaaccgtcgtcgtttatctatatatcaaattgctcggtaattttataaatctattaaataatttttagattctcgctatatatagtaatatctagtagagtaatagttattttattcttattaatatcttgattattaattaaactcttttctatagaacagtttattttttttttagtcgatttgtcgaggactggtagttaatctagattattaataattagcttaataaacgggcgagttaactcagtagtacttttattaacttaataaatagtcacgtagtccaagtcgaaaattgctttaagataaatatatcggagaataactataggcttagatatattattcaatacttcgatatagaaaaagtttatgttaactaaatagatatagtatatcaactgggacgtaattatactattaattagtttaaatatcaagtcttgattagaaagctttagtttaatcttaatagaaatcgttccacacaatattataaatataatagttcgtcgagttgtatagactagaatagagagagtataatcaatctttagtttataattaattataaagataaaatctttgtaagaataaatcactctacaaccactgtctaggtctataataatattttcgcggcctataatatttatatcgattaatagattagatttaatccctttaataatatatgctttgactctaatcttggtaaaactatatcaattttaattatttattaaaaataaaaagtagacgtaaaaaactacgtatttgattaataagtataacaatctaataccgctgatattaatagaatagttaatagtatatatattaagctctagtatagtttttataaaagttatattaacaacagtagataaataacctgtgttaagataaacttaactatagaatatagtagtatttaaactaagattcgctgtaataactctccacaaacaaagattaattagaaaaaaagtattgttagatctattcaattcaataataaacagttcattagtatttaatactttaggctcaataattatagcgctttcgagcgaaacggtagatttatttctattaacaatagttatatatagcaagtattaatagagtttattatttaatgcgaagtctttataataattaaaataaataactactataatcggtgggtctttaacctaatctaatatatttaaaactatattattaattagagaagtagatttaattaacgtattaaaagtatatagactatcaataaactaattaaattaattagtataatatactttatccagcttattaaattagttattaggcggataggcggtataaataatatagttataattattatagttattatataattaatttatataatatatattcaaattattagacaaattaaaaaattcttgcgatataaaatagttcaattggttttaattaatagtttaaccgaaatcgaataatatataaagctaatcctagttttcgcgagatagaactttattaataattgccgagtacgctctaacagaacgtcgaatattattataatagctattcttattttatagttatcgattattctaatcttaataattgatattactatttctttgattatttctccacgcattgcctctattagtattcgacgatctattattattaatattataatttacgtttatatttcgcggggggataaatagacaatactggtatagtaattgattttagttctagagacgcgattgccaacaattttatgcttaataatagttttactattaatcttagttctgatttagattttattatagtctattatattgctaattaacatttaaactatattactaattattttagaaatctctataaatatttctagggttagaagcttaataagggacctgccgtagattagtattaatattactattttatacaagatcgtagagtatagtatttctctgtattcgacaagtagtatttatattagccaagttttactatatataggatttctgttctagctgatcaagaaaaagatctagttaattatttttaattgattaaggaatatattactaaaaatatagattaaaatagttctaaattattataatctagttaaacgggttgtcgatattagtagctcgtgctagacagataatttcttaagtaaacaattaaataggttgttaagctcgaacgtcggcaaagatatagattatattattaagcttatttaacgcgacaactggatttggtttaaatcatttagtaaatttaaaaaatataccgtcttcgagcgtagtaaaagcacgtattagttattattctctattaataaattcaaaactataccagaataaagcggctcctcgaaaacaagttaataaattagcttttatcaatactttacccttatacacggctatatcgcgtatataatctagaaaagtatttatattcttatagtagacttaattactaatttaagttatagtaacgtcttctcttatatctagctaaaagtaccctactttatccattttttagtactccgcttcgattctcctgttactattataatcgttcaatagattataagggggattgggttggtcgtcaagcggattacgaggtgacttaagagatagtcgagagaaatcagaagatagatataaaggatcgtcaggtggtctctagcctaattaaaaccttttaccatcatctcgacgatcatctcgattatttcaagtggaaagagtttatatattagcaattaaagcggttaaacggtctttaaacactctaaaatattactatatattatttatcgcattaagaagttcacgcatcgacagctcattaatagaccgtaaactactagcgactagtacagtacttaatattgtatttgctctagacgatcgactagtaataaaaataaacagattcaactgttctacagccatagactagtatagaaatagtgttaggtttaataatagagaactcggtaatttcaagtattgttaaaatcgttagaattattaacattgagactattaagtcaattcaaccgttatttaaccgaaactaagttaacgtggattaagatattgttctagttagaaacgtgttctagctggtcgaatagtagaaaaagaacgtagtaataatatatactcaacaatattattagaaaataatttctagtcacctattcgatcacctaattaattacctacttaactagtaatcgtcactagatctagattatttacctaagataatcttattctaatcagtgtctgtacagctgtactactacttatgtaacggcgggttgcctcaggcaactagatcccccgcaggcgagccgccagcgggccgttggcttacgtaacgcacaaatatatttatgttagaatcgcgcagaggattccgatcctcaagcgattcgttctgttatactagataggggaactgccatacaatcctaaacaaccttgagcttcctagtactgccttcctgaagcccgttggccgaccgcgctccgcaggcctaccgcctatagatagtagtacgccggcagagcgcttacagttcgaatcgcttcaacccaacgacttcaagatggtcagtacacgaagttcgagcgccttaccgccggtggacccccagggggccgacggcacggccactcagtcatccgcaacccaaggagtctcccagagggagttcccggcagcccaaaatgctcgaacctccgacgtcccaatggaaccgatcgtcgaagaggacgaaagcgaaactcccgaaaggggaccgacgtcggagcgccagagcgaagaaccaatgttgtcgctcagcgcgattgcacgggtggctgaggtgttgaaaacaatcatgcagaccagctccgcggacaacgggttcggcggtctcaagctggctgcacctacccctttcgaaggcaaaactatacgtgaagtacagaattacatcgcggatatggaagaccacttcgccgcgagtgcgtcagcccagcggaacgataaggacaaagtcctgtacgctaccagctacctcggcgaaaaggccaaacaggcgtggcgcctgaaaagagaaagcctcggggaaccaagctgggaagagatgaaagacttcctttatacgttcgtcgacccggaggcggaccgacatcggaacgtcgcgtatcgcctcataaatgagaaacagaacggaagaaacatgcgcgaatggtgtgcccgaagcttagaagtatggcaagccttcccaaataactctctcacggctcaaacgtggatccaaacgctcgatcaggaggtccagagggagatcactcgcgcggctcgccagccacaaaccctgggagaagcacacgatatggcaatccaatattggtcaatgcttcatcgtgaacgcagtctacgcgacagtgaaggaagcggccgaaagcgcgccgacgggggaaaccagggtccggctggatttaacagaggcaggaaacgccctcgtgaaaacgaaacccctgctacgcgtccccgcggcagccgctcttcgcccgggcaaccgcctttcaaagcccgtcgatggaatgacggcacgcaggcggcccatgagcgcaaaagggactggcagaagaaagagggacgctgtttccgatgcaacgagatgggccacagaatctgggagtgccccaaggccgccgacggcgcgccggggaaagatgcctcccgcgaacaataggaactgcggcctctggagctcttagtcctgcgtcacccgaaagaacctacggcgttccctatcctcggcacggtggagctacaactgcaagaatcacccagtatcagcgccgatattaagccgatagggggatgggatcacactgtacaaacggtgaaggcactactagactccggggccgatgacaacttcatctcctatcgatacttactccaacacgggatcaccgtgtcgaaagatcatctccaaccaccggtgcgcgtgcggtacgcggacggtaccccggcgccgtgctacggcaagctgatcgtaaaatcccaagtaaccgattgggagaaccagacaagggggtacgagatggagtactacattaccgacctccaagacccggactatcagattgttttaggacgcaagtggatgcgccacgctgatcccgacgtcgttttctcggcgggaacatggcgctaccgaaaagaagctccaaagatctctatcgagaatcccaaacggtttgcaaagacgatgcgtcacacccttaccatgatggttatgtaccggccggataccgacgacgggccgccggagctgccacctcggtatagaaagtgggcccacgtcttttccgaaaaagaagcagctgagcttccggatgagaaggccgcacatccgataccattggtagaagggggagttccgccatacggacccctatacaacctctcgcagcatgaattacaggtgttgcgggaatatctcgacaagatgctcgaacgaggatggatcaggcattccaccagcgcagccggagcgccggtgctcttcgttcggaagcccgatggctcgctaaggctgtgtgttgactatcggggactgaatgccgtgaccgtgaagaatagatacccattgcctcgtatcgacgagctgatggatcggctcgtggaagcaaagtatttcactaagcttgatttaagagacgcatatcatcgaattcgcatccagaaaggcgacgagtggaagacggcgttccgaacgcgttacgggcattttgaatacacggtgatgccgtttggcctatgtaacgcgccagcaaccttccaggcgtacatcaacgaagccatgaaaggaatcctggatgactactgcgtcgtgtacttggacgacatcctcatctactcgcagaccgaggaggaacacgtgcggcacgtcggcgaggtgctgtcgcgcctagagcgggcaaatctatacgccaagctgtccaagtgcaacttccaccaagaagaagtaacgttcttaggattcatcgtgggacgcgatggtatacgcgtcgatccggaacgcgtgcgtaccgtcggcgaatggccggcgttagaatcctttcacgatattcaggtgttcttaggattcacggggtactttaggcgcttcgtgcaccagtacgcccggatcactaagcccctgtctgatatgttgaaaggaatgcagaagggaaggaagacagggccgtttatccttaccacggaggcgcgagaagcttttgatgaactgaaagcggcgttcagcggccctccgatcctgcgacactttgaccctgcattacgaatcaaattgatcacagacgcctcaggattcgctatcgcgggcatcctcctacaacctgttgacggggttgaggagccccgccggcgttccgactggcaaccagttgctttctactcaaggaagctgacggagatagaaggtcgttatcctgttcacgatcaggagttgcttgccatcgtggaatgtttcaaagtgtggagacactacctcgaaggcgcaccgcatgcgatccgcgtgcagagcgaccatgaaagcttgcaatacttctattcgaagaagacagtgaaactggataagcgtcaggcccgatgggcagagctcctggcggcttacgatttccagatagaataccggcctgggcacctgaacccggccgacgcgccttcgcggcggaaagactatgaagatgtccacgtacagagaaacgttggactgttacccacgcttcagaggaagttacgggcggtaccggatgatcggaacgacgtcggagcgccttcggtggccgagtcggagatttcgatcgtgagctcaagaggtccggaactcttggctctcagaacgatggcacgagaagttgccagagaggaagtcgtttgcgaagcaacgtcgcaccctcttcgagatgcgatcctgcaggcccaacagggggacgcctttgttggccaaatccgcggcaaactgctgcccggtgaaggaaagaaggagagcgggcacaaaagcgacgttgctgaaacaagcggcgacctgacggggcgatggcgcgttgacggcggattgctgtaccgcggagaaaccatctatgtgcctccgtgctctgcactcaggcaagagatcctgagagtgcatcacgatgatccatttgcgggccactttggccgagagaagactcttgaattgatcagaaggaagttctattgggacggtctgcgtacagacattgagaactacgtccgggactgtcctgtctgccagaagatgaaggtccctagaaagctgccgcagggcgagctggcctcccttcctgttccagaagggccatggcaagacctgacgatggacttcgtggtcggcctgccgccatcgggccgaaagggccgcgtatatgacgcaattcttgtggtggtagaccgatacacgaaggccgcgagatacctacccacaaccggaaccgtgactgcagaagaactggctaacatgttcctagatgaaatcgtctgcaagaccggatccccgagaagtctggtcactgacagaggttcgctctttaccagcgcgtactggatgcaattctgtcaaggtctccgtataaaaggccgcctgagtaccgctttccacccgcagacggacggacagactgaacgtcagaatcaaacgctcgaagcatacttgcggatgtatacaaactaccaacagagcgactgggcagattggttgcctaccgcggagttcgcttacaacaatgccaagaacgcgtccacgggatattcgcccttcatggcttggcaaggcatggaaccggcggtccccgggctcgaagccatcggaccgacgacatcaaacgcatcagtagaactgcggttgaaaggcctggccgacatccggaccaaactggaagaaaatctgaagaaggcaacggagcggcaggcagaaggatataataagcgccacaaggccacgcagctgcgcgtaggacaagaagtcctgctatcaacaaagaatatcaagtcatggcggccaaacaagaaactggacttgaagtacgacggcccatttatgattacggaggccgtcgggaaacaagcgtaccgcttgcggctgccaaaggcgtacggtcatatccaccccgtctttcatgtatcactgttgaagccataccaccggcgcgcaggagtagaggctggagaagctcaaccgatcgtcatcgacgatcaggaggaatgggaagtggaagaagtgcttgctcatcgagtatactatcgaaagctgcagtatcttgtcaaatggaaagggtggccgagttacgagaactcgtgggaaccagaggaaaaccttaagaacgctgctgaagctgttgcggcttaccggaaagccagcgaggtgccggaggcaccccgtcggtcacggaggagagcatgatctttttcccacagggttttgatatgcctccgaaagacgcggcggcattactcttcctctttcacccacagggttttgaggtttaatgaggatgtcctgagctactacacccatatcgtcaacaagaatactcatgcaggaagagcaaaacaacttcattaagttaagaaaagaaaaacagaaaaacggcccgaaggcacaacgcaggttgcccgccagcgggccccaaacaaacaaacagaaaaccaaacaaacgaactaccacaaactctcccagtccaccaggtcgccctcaggaagaggctccataccgccgagctcccgctggacgtttaccagacggaataggttgcggtttatatcccgcaacgccgctagacacggatggaccttgttcagcttaccgaggcggttggtagcctcctcgatatgcttggtcaggtcatccgtggccttcacggcctcttgactcggcggcagggcctgcagacgagcgacctcggcccgcgcgggtcccggcagcgcaagacacggcttcttcaggcgcgcacaccgcacgcagggccgcccggcaccccgagacacgcaaaccaagggtccctcgacaccagaagaagtgccaacgaacaacgacttggcgcagcgcctacagggcacctataaaccgtcagcgtcaccccgtcgcgccgcactcggattcagactgcctacttaccgggggggaactgggaggcgccgggggaggcgacggagaccgcggcggcggcgaaggcgacccccaggggggcaaaggagagtcccccccaggggccggaggcaggagatcatcaagatccccgtaagggggccggggcaacgtatcctaaaccacctgaatcagccagaacgcacccctgccagactgaggaacacttacctccgaaagaggagggcccaacggggcaggaggcgggggagggggcgcgagcgggggcacggggggctaataagcatagtagctctgtttccctgcgaaggcgcaccgacggctccccgaaagatgaggatatttagaaaggagtactcacagggttctgcagggccaaccgggcccgctttgcctcctgagaggctttcgcaactccacgaacggcgttcttacgtttacccatcttcaaaacaacagagacgccgtcaattcgcaaccctagcggcgcccctacgggaaaggaagccaaaacttaccgcgctgtctgcactttcaaagtgatctgaagaggtgaacatggctacgagaaatgttacaatttataggaataaaggaccctacgacgctatcccgaaagcgttccgtcagtgttccgactattcaggactattgtgaagcaatgtgttggacccctacaatcctattgttgagcgtttgaataaggcgcgtttttgtgttgcgcggcctatcgaagcgaggtgttgagcgcctcagaactcaggcacgaaccgggacggttcgtttttccgaaggggggatagttgtaacggcgggttgcctcaggcaactagatcccccgcaggcgagccgccagcgggccgttggcttacgtaacgcacaaatatatttatgttagaatcgcgcagaggattccgatcctcaagcgattcgttctgttatactagataggggaactgccatacaatcctaaacaaccttgagcttcctagtactgccttcctgaagcccgttggccgaccgcgctccgcaggcctaccgcctatagatagtagtacgccggcagagcgcttacaacttagctcattagtcgtcgaaacgcttaaagctcgcgaccgtaactttaatacttgttctaaagattgttttggttctggcaaaacgtttactggatattcttcaatctactactaatattgtggtagagaagtaatgagattatcgaatagacgtaagaatttcttgatgttcttatatagaatggaccggtggatcaaccaatccagtggataggaatatatattaaagaaaaatagtttctcaatatttagtttatgaaccaagtagtcaacacgataaagaatatcttaattaaatttatttaccaatagtgaacccaataaaaaataaaataatagaatttaataagctaattcagctaaacggagttgacttttactaaatataagctcaataagtagcgccttaatgacgataaactagtagataagagaataatagtaataccgtcaatagaagtaatgaagataataaggaagtaataaaattaataaaattaataatcaaggtaatgtaattaagatatacttgataagaggcttgatagatataaagaaagtactcgaatagtagtaaagcaacacaacaggaagtaagattaagagaataaacggaattaacgaaattaacaaaaacaataggaaaaacggtcaaataaacaaattaaggttctagtatttctagaacatactactaaattgttatagatacgccatagtccatctacttaatagttaatatagtcttctgataataaaaaagtagttgatcttctaaaggtctagcggttctaactgactatctaagaatatacttaacaggtgacctgacatgtgacagtctcaaatagaatatatagtacctttagagctttcgtaactgagagtcttctcgtctctttactctaccctaggattcataaaacaagaatattactgaagactatcttgattggtttcatagcaaataacagtcgggcggccatcttccgcgaaaatgctgttcttcaccgtctttaccttctttttgacattgctctccactgtcctcagtcaaccaatcgatgacattttacctcgcagcctcggagccgtcaagattgtcaacagtctacccgccccaatttatgcctggtcagtggccgataaagaaggcagcatgcatacgctttctgctgggggtggtacgtacgaggaagtatggcgtgtgaatccaaaggacagccgcatttccatcaaagtctcaacaaagcctgacctaaaagcaaacgatgtcatacaattcgagtatgaaatgaacggcgacaaagtcgattgggatgtctcatgtgctgacctccaactaccctctgaatttaccacgcgtggcttttctgttcagccctcatccaaagactgcccctccatcagatgcgcccccggcgatgagcactgttctcaagttcatccttggtcagaagcaactcatagctgccttctagttacgtccttgacattcaagctttgaagccaatgatactgtgtgggggattggggaaacagttccttctctgtctttacttttgcaaagtggccctgaatacgacaggacaatagttgacctaagtccgagttggcggcactttccttgtcttttaaaggatatgcgttgagcgacgtatcctgaatcaacagtttttgaatcaattagcaatttacattgccagtgaagtagacacctaaagtaagaaacctatatacacgaaggtacacatatgaatagacttatttttcattttcctcccctattggaattcccccaatctgttgctgactttggctttttggtgcctgagggcctgaggtagacaccccgtggagagaagatggactaacctgaaataggttagctcgtagtcggcttcccgcgcaccatgtccgagtccgtgtctttcgcctcgtccctccgaatcattgaccgatccaatatgtcgcattcaatatatacataagctcagcatgatgaatgattcaattcgaactcgtcggatattacgcaaaacatttgcgtgcgatgagtgcaaacgccggaaagttcgatgttccggcgatgatacttgcgccaactgtatcagagatgcaaaagcatgccggtactcgtccccgtcgcaaaaattatcgtcactgcaaaggtgaggctgtctgtcataggcttgagttatattacccggctataatcgttgaatggccggaatatatttacttacataaactactgaaggcgtcttcaagaatatgaacaacttcggcaggacatggaaaaagcctggaggacgtacctccctacagttgacttgcaagaagcacttcgaactgtacgagagagtcgccaggtagcaccggtaaatacaagccaggataccaagctgagtactgaggtggaacaccatactgagcaactcccgacaaacttcactgaacacagcaacgcagaagactatgaatttgacgagtctcaagacttcgataactcaatcgacggtatgggcttcttaactgctgacccgcataaggctgggtatacaggaccgcagtccggaatagctgcgttgaaatttctgcaatctcttccactgtaccttccactgaacagcgtgaacacgccctcgtcattggatgaggatgatttccccgccgcgcgatcccagtcaatggccacagtcagccgttatattgatgattatttcgctctctatcatcctgcgtatcccatcttacatgaagggacttttcgtgcgcgaatatcgggtatgccttgcgcacgagcctggtatgtatcagctttgctaaggaattataggtgccctggctaagccgcgggacggttcgtggccgctattatataacacggtccttgctatcggtgcattcgttggtgattctaatgcgaccaaatgcgacattcctttctacaaggaagcacgtagacacttaacgatggatgtcctcgagaaagggtctttgagctacgtgcaagctattgttataatggccaattacttgcaaaagcggaacaagcctaacgcggggttcattcttatcggcatcggcttcagcatggctcttgcaatcggcttgcaccgtgagttcggcatgccaagcacatcgcccttcactatggagatccgccgacgcgtttggtggacactgtttgtcttcgtttccggggctcagctgactctcgggaggcctgcagtgtctttagttggagtgaacattcgcctcccagcaaacctggatgaccaggatattgcggttgatatggagcatttgcctgagtgcaagcctgggcccactatcacatctgctctcattgctcaagtcaagctagctaagattgcaaatgccgttcaggtggagcttctcacgcaccatgttccaagatatgagagagctgtgaaactagaagagagtatcgggaattggtggaaggacctgcccccatatttcaaccaagaggtcaatctggaaccgcacttggagttgcctaagagagttcttctatggaggtctttccacctgcgtatcgttctcaatcggccctttttattcgaggctatagctacaagatcagccatcagtacatcagagggcccgatcaattcgtgcctatctgcagctgatgaatgtgtcacgtctatatgtggatttctcaaccatacggatagtagaaaacggggtctcgcatggtatgcgacatactggttgatcacagcgagctttgtgcaggccacctgttacatctatagcccgactcatactatggctccatcatggaagggacatctccaacaggctgtggattgtcttgagagtcttgggtcgtcgcatgatatggcgtttcgtgcacggaatgtattacagaagctcctcggtgagacatgctgcctacccctcttcctcttcatttttgtcccagttgccaagggttcatgactgacgtaaaatagaacaaggtcatgctgttgacttgactcaaaatattagcccgaacccaacggccgtgacacgcccttctcgtctctgggccccgcctcccggtgctcaaaaccaagcaatatacaacccgttatcgatggggctagaggatagctttacgtggtatccacaaggcatgtctaatgcggaactcctggacgcggccgggggcttcatgattcaaaatttcttcgagggctcagaaggacattcaggaacgagtccatggatggcaatgtgatccgccattcgctgaacacatgaaatcttgacttagccatcttctgtgtccttctaatttctatccactaacacatagagaccccgggctcagcctacaatttatcgatgcgggtacattgaaacttaagcatgcacttccccgacacatattaactgaaaatcattgcatagtggatactatatgatttgaacgatcaaacggatataacacatagatcgttcgttgctcaggttgctacatggtgaactgcgccaacaggagtcttttgaccgtcaagaggcagttgtaggggctctagtcacacatccatagtactcccaaattctatgacggacctgcaaaattagtgctctcttcaatgtgctccgccgaagcatttttggctacaaaaatttcctctgcagtggcagcttcaccttctgcgaaatagccttgcagcccgaaaagccggttcatatcctctagcgaccgattcctcgtctcaactgtataccgtgtcagcaatcgaataactggttgcagatcagattaaatcacccacctagcgcaaagcggacgaaaatgaaagcgatgacacatatagcggcataaacaacgtaaaggccccacccgattgcatctgcaactggtggcgaagcctgggcaacgatatagcacatggtccaattagcggaagttgcaagtgcgttgccctttgcacgcatggacagcgggaatatttctgacggataggtccaggccgcgacaccccagctaatgttgaagaagatatagaacagatagggaaagaccacaatcgcatagttaccctttgacccggggctctcacccgcatgccattgcaatactgcgattccgaccatggctagcatcattcctacggtcccaatctggagccatactttgcgccccagacggtcaaagaagaagatgggtatccatgcactgacgaacagtgcgatcccaacgcctcctgtcgccaggtttgcggtgcgaggatcggtaataccacccttttcaaagagtgtcggcgtgtagtaaaggattgaattcgtgcccgtgacttgctggaagccttgaatcccacaaccaaggagggttagccgcaggatagggattttaaacattcctgtccaagatgctttggtgtgcttctctaggcgcattgtttcctggatctgctcgagttctaccactgcagcctctggaccgtgtaatctaatcaatacctcgcgagcacagtcgtgtcggtcctgagtgacaagccaccgtggacttggcaagacccagaaccagcaacctatccccagaacaatggccggaagaatttgaattgccaagggaatgcgccaccagtgtttagtcgagaggtaattgaacccatagttcatccagaatgcacacagctcaccagtgcacagaaccatttgctctattccaatcaatctccctcggagggttggaggagcgatctcagattgatacaggggtacccctgccgcacatcccccaacaccatagcccaagactatacggccaatgatccatgtgtttgtcagaaaatggtatatatggtgaaaggctggctgtttactatttggacaactgtgtacgaggcagcttgtaggactgcaccaataacgaagacgacgctcgcaatagccaacattctctcacggccataccgatccgaaagactaccggtggacatggcgccaatgaagcaacctacatcgtacattgaaacaatagcaccagtcacccctgagttgcaatcagctattgaatgccccacaatatgaagctgattttggtggcatcgaacatacatgaattcttaggacgcatcaaatccttgaaccgttgatcggcgacaatgacacccatgactccttggtcgtagccaaacagcagagcacctagggacacaaatgcagccagtttgtatacataccatggatccctttgccgaggtgcagagggatcagttcctgcgggtgggcgtatcaatttcgtttgccggagtgaccacattttgcctttcgaccaagtcactttgcgcaacagcgattgttacatgatctgagctggaacatcgcgtgatatataaactccgaaatatgggtgaagccgtccggggtaggaattatgatatgttgaagacatacttccccacgttgttcggcttcggtgatatctccgagcccgtctccactgagggataccccgccgacaattgtacatcagctgctcggagatagcagcgagaaccttatcctatgtggatctttcacgcctcttggctaaggcgcatcgtgtgtgtgaaaagaccacttgttttggccgctgcaccccgcatgaataatcgaccagaagcagggatataagtcttaaatcctctacttgttggaacctcaagtacaacctacccaagcaagccataatttataagttcaacaaagaacatcacaagccctaaaccatgtctctcaaaggaaagattgccctagtcacaggtggcgcgagaggaatcggtgccggaatagttcgtgccttaagcgaacaaggggccaaggtatgtcaactactattttacgacattcccactttgttcatgactggggtgcttacgaagaacaaacaggtcgcgttcaactatgtgtccccatcatcacgcgcagctgcaggatcacttgtcgagtctttacagaatgatggccatgaggccttcggcatacaggccgatctggccgatatccaggccccagcgacccttgtttccgcagttttgtctgccttccaaaccacccagatcgatatactcgtcaacaacgccggagctggcgacaacagacccctagaagaagtaactcttgaaagctataccaagctcatggatatcaacgtccgcgccgtggtcttcatgacccaggccgttctgccttatatcccccgcggcggccgcatcatcaatctctcctcaatctccgccagaggtggctacccaacacagtctgtttacgctgccaccaaagctgccgttgagggcctcacccgcgtttgggctactgagttgggtcacaagtatggtgtcacagtcaatgccgtgaacccgggccctgtcgatacagacatgtaccaggctgccggaccagtccatctcgccaggatggaagagcagaacaagaaggtacctgccggtcagcgatgcggcactacgcaggatattgcggatattattacgttcttggcggaggaaagatcgcggtgggttactggggatgtgatctgtgccaatggcggtatgctgtatacttgatattgtcacaataacttgcaatagcttctacaatatatctgtccatcacttggttccatcttcattttcaaagattccgatacagtatacgaaagcatcctttatctagtgtgtgtatcttctgcgatgaagcaaggaggagcgtcttgaaaggacgttctcctggtaaatcatgaaaagctatcctcgtagatactcatcgaagatcccttgtgaatctgataatgtttgccaagaatgcaccgagactactatagccaaacactacctcgtctcgctgcctaacaatcccaacccataatcccgaagaatcttatcccgccgttctccacggtagaccaaagcatagaactaagaaaaacagagaaacactagaaataagatatgtagatagcacgtatccgccgcacacaccagtccacaggcccgatagtacagaaagtggaatacgaaaagagagacgaggaatctatcagatagtcaattagagggatccagtgactgaagatgaattggtctacaggatgggatgcttataaaaccctacgtcttgcatcaggcgttcgggaaagcccatgtatgtggagagtcctgctgcgatttcctccttagacgacattggggaaggttgggccgaggtttcggtcatattagatgctggtttgggaagagccatttcttcggtcagaaggcgaaaggaacgcacactgtttagaacatggagggatcagttaagacagattttatcagtcagttggctaccggcccactataaactagtaacaactaaccattgaaatcctcactgtacatgcccggaaatgtccacaactggaacccattagcagaacaagagcagccggaaataagcgacattcatcacgccctatagggattcttaattagcggatagtccttgaggaccacacttcgacgcgaccatgaacgccatggggccggtggagacgtatggagcttctaatttaactctgtggaaaacaaaaatgaacacatcttcattatttacacctgcaactaattcctaattcaattttcactctattacacatgccacaatccgccgaatcaagtctaatcatccaaaatctgcactttgatagccttagaagcagggttactcgccgtctcgaaggccttgatcccatcctccaacgcgaatcgatgcgaaaccaacggtttcaaatcaatgattccagcagcgacgagaccaatcgccttggggtagatatcgtgatatctatactgccagcggagatcaatctctttggcggagagatgcatgaaggggatggtttggaaatccttgccgacaccgatcacgaagacggagccgccgaaacgggtggactgtttgtcagatacattaggctactttttgcgtgatggggatagataggaagaagggaaaccgtacatatattccagcatggatactagactccacgcccgtgcattcaatgaccaattttgcctcctggcctagagtctcgacaatcctgcccgccaaggccttgggagtgtcttctcttgtgaccttcaccggtcgaacgcgcgggactatttcctttgcctttgcaagacgaccctcgtccaagtctgtgatcacgatgggctctgcgcccgctgcgttggcggcgagtagagtgacgagaccgataggtcctgccccgcagatcaccaggggatcggcgaggcggagtccggatctgtcgattcctgctagagcgacggttaagggctctaggagagcaccttcttcaaaggagatattgtcgggaatatggtgtagccatgcctcggggtggacgtggtatcgtcggagagtgccgtggtgaggaggcgtggagaagaagactacatccgggcaggcgttgtattggcctgttcggcagaagtaacaggtgggtttggagcaggggacaccgcattccatagcgactctgtcgcctgttttgttttcgttagtatgtatgcttcttataagtggtggtaaatggtggtttgtttagatgatttaccgggcttgaaccgagttacatccttgccgactttaagaactaccccggcactttcatggcccaggccgttgtcccctgttactaccatatctccgatgtggccatgtttccaaaagtgtacatcagagccacagattccagtggcacggacgtggacgaggcactcatggggttggatttcggggatgtctgattttactagacggaggtcgttcgcggggctggtatggatggcatggttgtagggtttacggtcgaggatgtccatctttaccttgggtatgacagtgaataaactgatttgttccctcttggatggttatagaggagctacttatatcttgcttcggaggccgaaaggctcccatattggggaatcgtatccggtgggatagctcttcggacataccgccgaattggtgggttgctggccaatgttcatgccatcctcctgcagaagatcatgtgtcgatccgtgaacgaagtaatgattgtcagggcctgcgattatcgtcacttaggaaaggcacttcggcatcacctccgaagtgaatcagtatgcagttcttagttactacgtaccacttaccacttcggaaactccccggcgcataaaaacaagataacttgggtaggtctatccacagtgaacaacagcatattgaaggcgaacaattcatcacatcgtattggtctagacttgtctcggcctgcaacaagtgcttagaacgcggggtgctaatagttacccagatattgcaactgccgccacactccactgagttctcaacatcggcgtgctgggatggaaatccatacaagaatgaactagcaccatagtaaggacctgccatggtgatctgatgctctgtatgatattcattctattctccctctccggcttaacagaggctgggttctgtagtgaggcttattcctctttgtttctcaaccaggtattctaagtcatccttcgttatatatctcttccctccatttattgacgacaatataatgcagtcattctaatgacgccagctttcaaatgtcatcccagtcaatatcttcgctattgacttctttgggtggacatgacaacgcaaggaaaacgttgttggatccttggctccgaaaagtctacagaatactctcccagcacgtatgcactagattttctccaggctttgttctatgtaaaagttttctaaacccagtcatagggtaattagtatcatagtgaagtgtcatatgacggagagatcgtgaactgaatccggatgggttagtattgggacctttgatatctgacttgctttgatgttcttgtacgaaagaaagagcagccctaccatctttcagcttgagatgccatagtgacactgtaggatgacaggtattcattatcacgctaaatgcggctctctcgcttttgtttttttaacaacgagaatgccgctttcagccaaacccgatcttttacaaagggcgctgtttttttagatatggtattctacggacgtgtttggccatatggctcgagtcgtctccttttctctttctttgagtctctcctttgaagaccagatatagcgaaagcgatatcattaagtcactttcattgatctcacaaagcaatcttgaacatataaaaacgaacaacaacccatgctgtagcaaaagatccagtttcgagcctctacatctacctgatacactgatacaccatctttatctttgtttccctctaaccttcttcccaaaagaaacatgaatctccaactctggaccctgttcctcttcgccacaggcacattcggtaaatgctttctaagtgacgaatacccagaatgtgaatggaacggaagcgcacctttctgtagaggcgcaaaagacggtaatgagctctttgagaaaaaagggatgaagtttatttatggtacttcatcatgggagagattgccattcgaaatcagtcaatcaccatgtaaacatgacttcggtcatacctgccagcgtttcttcgagaagaccctgtggtgtaaaccgaagcattgatcttttgggttgttttccacgtcacggctttgttcttgtttgttttaggtgggtgtttcacttccttcttttgttttgctagattattaacaagctttttgtgctagaaaagatattctccgatatgaatggctgggaaggtcgagtgtgagcatgagcaggtatcattgtctacttttttattatagttatatcgtcgtatctactagttgctctatataaaagtgttaaacaatcatgtatttcacctgaaccaaggattgtataacggtatgagtttgtagatgcttatatctattgcgtgcatgtcgaagccccaccctagattgatatgccgtaaagaaactgctcattagatcgcgtatgatccaacacccatggtaagatcattcagtagatcccaccctagaaagcaaccatccaccactctgcaacatctgaaacacaccatcaggatcatacttagacgcaatgtccttcagcctctccatattctcagccccatagcttgccaacggatcctgatccggcgaagcataattacaatactggcagggaatatacgtcccgttcgctttcgcagtcgcttcagcagcgtctactatgtgacgcatagcttggcgtacacggtctccatcggcaggattattccaatcggccatcaccagaaaccctgggcttggttagcaagtctatcataaaagactgagggaggtgacatacactgctggccaacctcctccagtcctagtgggtttccgccgactttccggctttgtttaatgcctattgaggacattggttggattacgttattgatcctaagtccttcaacatcgcttagcaaatcactttgctctacgcggactcgctcggcagtttcatatacctccagcgatggctggctgctcatggtccggaaattgtgactttggtaattagcattttcctcaggaaagactagccagacaaatacaaaccacacatgtcccggaacagcaagatattctatcacccccaaaagttcgtacgtagagtatacaccccggggtagactctgggaagttgctgggatatgctcaaatggctcgaagacagccggaagcttatcgactgcgtcgcagtagaacgagacaagcgccgagccttggttattacaggtcaggagcagagaggatttctcatcgctttctattgcctcatggtgcttcattagggcttgtaatagttccgacgtgacggatggcgcgtagagcttggcctctgaccagaccttggcgggcacagttttcatctcgatcttggttacgatgcctttgccagaatctaaatcaacattgatacaggtgaggatagtagatgtctattcataccgaaattaccacccgcacccttcaaggcccagaacaagtcgctgttttcctttacattggcatttactatctcggcatttgcgagaacaacctatctcagatcagaaacaagcgaccaagtccgtgatggagcccatacctcatagttagacaccgccagatcatactgatcaagggctttataaacatccaaccatctcagaccgactccgatatccgcagtcaatttatcctctgaaaggttcacctggtcaaatgcagccagggaaatcaccacgcccccatcattactactccatcctatactaggcgaatccccgcctccacggatggagaacttgatgccgaagaatcgacaaagtgatactgtcgttccgacttgttgagttgacccgggaaggaccactacccgtggtcggagccagcaggcggttgaccgacgatggcaaatataaggtcaggggatattcacataggttcagtttcaggattgtctccatgggacgtgccgctgagcttcgtatgcacttgaaccatctaccacggcattttcgccgaagaagaggggtcagactttctccatgaacgagccacgttcgttgtccctttccgttggggatagattggtgaattgttcaaagagggtctcgacttggggtatgtttttgggatcgaggttggccccgtttacgattgcggcgacactgggtagtgcggccattgtgtttgggttgatcggggtatggcgatggcttttattctaaggatacacgaagatgtgatgacaaactgttatatgctctctgcaatctatatgagggctgatatagcggggtaaccgtaaccattgctacttgaacaccttgcatagtatactataccatatagctacagtaatatctagacatcatgtggcacagcgtctacacaaccctacggagtggtaagcaactacagaaaccataagaaaaccgggaactgcgcaaatccatctacccaggttggcacatgttcctacttgtttgctacgcagacagtatcgccacctgcttgattctgaatccgtcaaattgaacaaggatgtgctgcgcctagacccagaactggtatagactggcttggactaacaagggtgtctagctaagcctttggtaaatcgggcttcggcgctagatcgaccatttacgaggtactatggataaatggtctgggttgtgggtacgtgatccgcgttattcctgcctcagtaggtgtatgacaacatgactggttagaatttcagccacaatgtctgtcatgacataatcttatctctgggtatattttccaggactgccattgatgactgtgatgttgtcatactgctttcgcccagtgctgtgctttcagtttgttgtggggtggtataaatgggctcagctctggttgcgttcacttcgttgtatacgttctgattaccactcaacgaaatatcaattggtcctaaatcgtgctttggactatctatcagacatccgacaaagagaatgtaccgttcaggataaccgaaagtcaattctcgtctgaaacgtcaccttgcgaatcgctcgttggcagttgatatcaaaacaccatcacacatattgcaagcctgcaataatacataggaaaacgtctattccctggcccgggaaagaaaagaataatatacaatcataaacccatcccaaagccccaagaataaccaaatgactccaccaataccgccccaaatatatacatacatacatacataacccagcctaatgcctctcaaccgtaacctccataactttctgaatgcccctctcctgctccccaacagcggcaaacatgccctgattggcatttcccagaataagttcttcggagtcattatcgcccgtcactttcgacgatgatatcgttgttgtatgcggcgtgctattatcgtatggccggggcaccggggttcgatcgaatctggcgtcgtcgcgaccaagactgctgaggccgaatttccgacttgatgctcgggtttgtcgattgcctgaggtgagggggtagtcttgtcccgttgggcggcggcggtaggaactgatgttggagacgaagacacggaagtagggaccgtaggttgggacgcaggctattattacctttcaattggttcgtggcatgttagtttgggacgaagaagaggtattccgtgggacactaactgctaggctgatctcgatgatggaccataaaatgacgggtttgctgtctgtgtaggttttgagtcgcgcgatggtgaagatgcggatgatttggatgattgttacgaagaagccgatggcgaatacgcagcagagagcgacctaagggtgatcgaagtttagctcagtcgatcttttgacatgccaggtaggcgaaggtgattaccttttgcctttttccgagttgcaggttccagaggaccgggagagggaggggcgatgatgaggaggtcgaaccctagactggttcctgtgttcgttagaattggacaatagatgaatggatcatatagacgagaatgcgaacctgcgagagctggagggtggttagttaaccatcaccaaggaattaaattagtgatacgcaccatagtatgacttcagggtatcgatacacttcccgctaaggtcagaatcccattgcattgcgatctgtggcccgtcaatatcatcgcttactggtatgtggtctgggattccatacaggtcggcacgggaagataaagaggaaggtgaaaatcacttgattgactaccacggccacgatcgcaacgataatgatggtccggtacaccttcacaaacccaccgatgcgcaggtaggaagccagtagcgagaccttaaaccccagcaaagccatcgcgtagaacgggccgccaacatattgtacctgagcgagcaaacgttagggcgcacatccatggcccggagggacagtcagaaaatcaacacataccttactgaattccttcacattggccgcggggaaatactcagcatgaagacctagaccccaccgagtctctgtggcagttgtcagacatctagtcttttttttttcttttctcaaccgacatagaagaccactcacgaagtatactactggcacaatatccggcgaccatgatcgcactgtacagagcggcatagtcatccagccataatgatctcttcgtgtggattcggatgtagaaccgcaggatgatggccaggaaagccgcgatcgtgaaaaccagacatatggcaattacttggccaaaatcgctatgtggatcgggcttttcgaggttgtacacccagcccatggtgttagagcagtgtcgcagctcagcaactcatgtcaattagcagaatgtgggctagaccgggggataaagatgccagggaggcatcaaggttgcacattctaaagtgaattgattgttctaagttcaatttttcctgcttatttcatgccaaggttcaataacaatatcatcctgcagtcactagttgcagcagaacgccaccagagattaacctctccaccacgaggtagactaaatgtgcacccctgcagctgcacattccagctgcgccagtcttctggaaaaaagcaaggggcccgtgtgagcgccctgaatgctggtatgttgctcaatggggtcactgttctaaagtttgagctggtgtgatggggctatgggtcggataataatctgatccactggcatttcgatcaatggtgtcaaatagtggtggcttggggtttacagagtcggattactccggagtaagtgcgttacgcataaattgcggcccgtgaccatgtagaccctatttctcggcgtgccatggttcggcacacgcggagaagattatatgcgatcatttatcagcaggactgcaatacaacagtgaaggatatataaaattttcagtctatgatgtagcacaggtctggaatctcactctcgccgtccatcaggacatcgcactcggtgtactgtagtctgtatgttcagaaatgccaagatccggaattacggaccaagggccttgctaaccaagaactctgtcctgacaagccttgactaattaggaattgaattcggctgcgagttattcgaaacactaccgaaaacatcccgattgcacgcatgatgagatcctctgaatcttcaatcaggcaatagacaccagttggtgtggagagaaaaagtggattatgacgtgattcactgagcaaagacatcggatcattgcctgtatagtgtacccttgagcagatgcagtcgaagatccaactgtggatggtgtgtggtgtacggaatagtgtgctgatcggcgaggcctaatgggggatgtcaggcgaactgcaaccatggaacagatggcagtctatttcctcgaccacgtatgcaatgggagactagccacctcgcccatggaagaagatatcccttgcccgaataagctttgaatgtgcatacgcgagcacgctcttattacgatttacctgccaaatgcgttcgctttggaaaatggttccgcggattacaaaatgcatatattgacgggctactgcaagctccgtcctccgagcaatgccggagccgaggttagattctcagatccccaaaaccaattctgctgccttctagaacctggaatctgggctgatactggcaaacacaactccgtacacagtagaccatcggatctccacatagcattgactagttttgggggccaaaaaccattgatcagagactgcggcattgattttcggtcatacaatctaaatattccgggataattacgcaggagccttgagggattgactttgcaattaacccctaagcattcgcactattttgctccgttggatccactagcggagaaagcccggtgaaacgccgcccgatggacttcaatgattggtttcctaaggaatgttaaggagaaatccgtggattcgtgtcaatctagtaaccttataaccctttctagtctatgtacagccccggaaaaattccgccactcctattcttctgtcgttttagacactgcacaaacgaccatcttcacgaacggtccattcatccgatccgacagcggtagtggcgtaaaagagattgtccgggtcgtatttagctttgatcttgcgcagggttgcgtagttgtcgccgtagaaatacttctggaagttgggctgacggaagtcggcctcgttcagatacgcccctgagttcggggcgaccttggtcaaggccgagatataatcgttggtcatcttgtcctgctccgcaagcatctcactgcgggcattccacttccagggggtggtgatggtgctgtggatcagggtctcgcgccaagcgggcagcacagcgttgtccacatcccccactaacgccttggagacattcaggcccacgccaataaacgtggccccatcttcggtgatgtgtctgtatgcggctgttagtccgtcgttgttgttttccaccaccgaccgggggatcagccatccaccatactgggcggtcgctacctcgatcgcgccctgcatggcgttgaattcctccaggtagctgtcgaactgcttggagtaggtcgtataggtgatgcctagcttggtcagcccatcggtgaagggcttcacgagtgcctccaggtcagcgacggggatgttgggaccggtcaacggcgtgatcatgaagctggtgttggtgaacatccagacggccatggcaccggcgtccacgaccgagggaaggacggtctgccagagcgacacagcctcatagaaggtatcctgggacatgccgtcattggtgaagctcaaattgtaacccgacacaggagtgccggtgtgcgccttcgcagtcagcgaccaggtaataccataggaaccaccaccaccaccgctgagagcccagtagaggtcggagtattcgttgtcgcgagtggcagtaatgaagttaccctcgccgtcaatcacctcccactcgagcgcctgatcggcgcccagtccataccgcgacgacagggccgaatgtcctccaccctgagtgtaacctccagcaattcccacggtgggacattcgccgcccaccacctgaagacccgcgttatagccggcctcgtacgcctctccgccttgcacaccggcgcccatcttgatggccttgccttggtagtgcgtgtccttgtagtccttgatctcaatgtccttgatatggtgcatccagatagccagggcgccggctccggtagacttgccgttgtaatcatgtccagtgttccggggaaccacacggatgttatgctccttggcgaacttcagagctgtagagacatgctcgggcttagccacatcaacagcgtaaacgacgtagtttccgatggtgcagggcttcgattcggggtggaagggatcgcatgttccattagtgaaccaaggagccatgatagaagacgaagtttcatagctgtttcattagcggaagccctgcgacgatggatacaagacgcagacttactgaagcgccggatcagtccactgctcgctgagcttctggcattcagctgcattgtaattggggtcatggcatggtgtacccaaaggcacggtggctaccaggcggccgtcaaccgactcgttgaatttggcccaaacatcctgcgccggccagcaagcatcaccagggaagcagcgacagttggagtcggctttcaccgaagctgtggccagaaggcctgtcaagagcgacaacccagtaacttgaccgaacattgtggtggttgtcgagggggtgcagggatggaatgcaggacaagccgggacgagctgcacctttatgatccctcactcatggagtggagcgcgattactgactggtctaagccaacggccactcctaaatctagtgcctgaatcaggtcaaaccttcggatgggtcaacgctcatgccattgggtccctaatatccaccggcgataaactactgtaacctaaaggatgcggtggagctaataaattgttcggctaaacgtgcgaaaaagcgcgccttggtcgaacctaccacatccaatggtgtattccggagtaattcatttcagaatgcaatataagttaattatcagttcatcaaaaatccgtctagccaaatgaaaagtgcctcgtgggtgctgctcacggtttcacttgttccacaatttcctccctctggtcccctggcaatcggtattcctgcatcaatattcccggtgaaggtgctttctcgacaaaagccctcacttcaggggtcggaaagatataatgcaatgccgtgtacattccggcactaattgccgtgcctgtgaggaagcagatgtagtactctgtactccgtaaatccgcgtcaaccccacgggaactaccacgctgagatcgacatagaccacgaacccagagagtgaaggaaccattccacagagccactgttgttagcttaactaacacacagcccaaaaattgggaaaggctaaccgctacaggggctcgccaattgacgccgtatgtgtaccagtagatacctttaccatccgcgtggcatggaaacaaatcctccaccttgatcttgcgtcgcatcccggcgaagtaagaggctagcattgacactaccattggtcccagaaagatggagtgactactaatgactactaagaatgtgctagccgtgttgaccagtttccatggattgcatgcgatcgagaccaggaccgtgatataggcgccgcaacgaaggtttatgtatctcggaaatgtagccgctttgtcaacaggcagaagttagctgttgaaagtattggaaaaaacgagggatttcaacctcccactaatgcatttgctggcacattcgatcccatctgcgacacactcagcgcagctccccccaaagaatgcggcaactcttgagcgtgaacccctatcctctatgatcgcactgagcagggtgggcaacttccatagcgattctgcgtggccgccgttacaaggatactcacggtcgcacataagatagtataactgggaaagctgactagttgtccgaagattgcctgacgaggtgttcgcccaaacctcatatagtcattattaaccaccaatccatgcttgaaccgcatctgttgtgcatgataagcttattgcgatcggcatcggcaatgaaagacctacaccagactacgtaaatgttagccggctctagcgaaactcgttacgatgagcaactcaccgatagacagtgagatccggtttcatagaacaaatagactgccataggggccccaggcatccccattgaccaaaggaaacccgactaatgacgttggtactgctcgctctaacggctgtgtactgactatggtagaacgtccccggtaatgagtttataaccagtatcccggttgcaattatattgccaacgactgacgccaagtcaaccccatggcaatcaaggaacttcttaacatatagactgtgatgtttgggctggccggaacgccttatctattagcttatttccttccggaaaggtggatgagtatacaaaagttatggaaagtccagaaattccaggttcgctgatctactacgatgggcttgatgttattattgatccatcggttggggatttgtcctccctcttgagtggcttggcggtgcttgagaataggattctccatggtcactgaagcatatatatatatatgtccggaacagaggccagaggtgtcaacgtggaaaaaatgcttaaatgtggacttctcgtggctgagatacgcatccgttacacagcgaaataagggcaaaatgtcggtgtccactagcaggacgcaaacaatgtgaggttcatgtcagcgtagctgtgactcgctatattgacatactccttgcatccgcagtaccttttgcatagggtaggcaccattcacactagctgcagcacagatccagacaccgacatagggagtgatatggcaaaggtagaatccagagggaaactgctagatgaaatgcgaaacctgcttcgctacctgaaggtgtctggctggtgttgagaatagtcatatcatggtcggtatgaagaattcaacgatcggctaataaatgatataatgtctcttcgtcctctgtctggttcactcctttccctccaatctattcttttctatttttcttcgcttgtttcttttttctatttacttcggaaacctcgcgaggatatagtaacaagcaccgtttggatacaagagatgcttcttagcttggttttcctggtgtatctaataatagaatcaagtcataggttgacacgatagcctcgaattagatccatatcaaagcttcatatacctttatcaagaatatgcaagtatcaatatgtacactatctcaactcaatcccgtgaggggtcacccgattccccgcgccctaatcaagacgcccctcgaccaccatgcaattgaagctcttctccctccagccatgaactgcatggcaacctgtctattctgaatagtagtacatgtgccggtcactctacatgaagaataccttccgacaggaacaccgaatgataaacgtcctcgagcggaatattccacccaagcaaagtagcaaagtagcaaagcactcatgagcacgccatagcgattacccagcgcatggtcacagtccacaaagttcacccagccagatcaaaatgaccaaatatcgcatcggcgtcgatgtcggcggcacaaataccgacgctgcaatcatcgatatcctcggtatcgactctccctcgcgcggtgtttgcgcttccacgaagactccaacgacctcggacgtgacgtctggtatatatactgcaattcagaaagtactggagcagtcccgtgtcgatagacaggatgttgttagtgtcgcgatcggcacgacgcattttgtcaatgccgttgtccaggcagactcgagtagactgagtaaggtcgctgtcgtgaggctctgtggtccctttacgagacaggtgccgccttttacggagtttccgtcagatttaaaggggattatgggcggtccggtgttttatttggatggtggtgagttttatacgattgtcttgattctcatgtctgggccggtactgatataatattgctaggccttgaaatcgacgggcgcgaaatcgcaccattgaatgtagaacagattaaagctaccgtgaagaacattcaagacgcaggcatcaagatggtggctcttctcggcgtgttttctccattggatcacaatgggatccatgaggagacctgtaagaagttgatgctcgatttggatccctcgctatccatcgtctgttcgcattctatcggtcgcatcggtttcctggagagggaaaacgcgactattctcaatgcatctattcttgccttcgccaggaaaacggtgagagcgttctgtagcgcaatggctaaactgcaactgcgttttccgctgtatcttacccagaatgatggcaccttgactgatgcagccacggcggctgaaatgcccataaagacctttgctagtggcccgacgaatagtatgactggcgctgcgtttcttgctaacttggatcggggtggtggttcgaaacaatttgataggcaggtgctggtggttgatatcggtggaacaactactgatgtttgcgcgctgcttccgtctggatttccacgtcaagcatcgaacttcgtggaggttggaggcgtgcggactgcgttctcaatgcctgaggttctgtcagttgggctcggtggtggtagtcgtgtggttgtcaatgaacagaccggggttgtcagtgttgggcctgagtccgtgggccattatctcaccagccgggccatggcctttggtggggatgtgatgactgcaacagatatcgttgcagcatctgcaaaggctgatataggggaccgcaagatggtagaacaaattcctgcgcaggttgtcacgaaggcccgagaacagattcgcaaaatcctggaacgtgctatcgatggtgtaaagatctccgaccagccggttgtgctgctgcttgtcggtggtggttcagtcattcatatggatgctttgaatggtgtcacggagtgtatcatgccgccgcaccatgattctgcgaatgctgttggtgcggccattgctaaggtagccggggagatagatgtgattgagctactagagggccgagatgagaagcagatattcgaggcagcaaaacaacgagctattgatgcagctgttgcccgtggagctgagagagacggggtaaagatcgctacaatcgagaagattcctcttgcctatgctacaaacaaggcgacacggcttgttatcaaggcgattgggaatcttgctccattggatattgataatcaagcgtcagagtccaatactttccaggacaatataaacgacactcttgaaggaaatgagaaggaacccagcaagagcaataaacggcgtgagacaccccatttcgctgcgaaaccatccctccagatcgacttggatacatatcagcccgacgtccgcaacaacacatggtacatatcccccgtcgacctagagttcatggcggccggcacaggagtcctaggaacaggcggcggtggcccttcccgaatacagtacctccactgcctccagtttctccaagctccaggatacgcgggaaacatgcgtgttgtcaagcctgccagcttaagggactccgatgtctgcgtcatgggctcgtgattcggtgcccctagcgtatccagcgagcgtctctcagcaggcacagaactggctctggctattgaaagctgtgcgcaagttaccggcaagaaggactttcatgccattgtcacagacgagattggaggcgggaatggtttgtcggcattcccttccagtgtgatgtacgatattccggtggtagatggggacttgatggggagagcatacccgacgctggagcactgtgagttgtttgatttgatatcacgatgttaacaccactgtactaactctctaggtacgccatacgtctacggactctcctccactccttgcgccgtcgcagacggaagagggaatgtatccatcatcctggtgcgaccctatacaccctccccctatctatcgatttctaacccctttaaccccaacagcacgccgagagcaaccgccgcgccgaaacaatggcacgaagtcaatgcgtcgatctaggaaatagggtcgccctatcaactgcgccacttacgggcgcccaaaccaagaaatatatcataccaaacaccatctctcaggcgtggtatatcgggagagctgtgtatcgtgctcgacgatcaaagacagacatgattcaggccattgtatttatcctactctcccgttttctacttggatatgggacgagcactaactttgaaagttcgatacctcgcccggtaaactcctctatactggcaagatcgtcgacgtcaaacgagatgtgagccgcggttatacaatgggctattgtctgcttgcgcctcttagtagcgatgaacgggagagtactattccttctggttgtgctgatggtttggtagagaatcgctacttggttatccccttccagaatgagtttctttatgccgcttatacggatcctgaggctccggaggagatagccaagcaagaagttatctgtactgtccctgatttgatttcgatactgggacaggatggcgaggcgattggatcgcaggagctacgatatggtcttaaagtcaatttgattgctatggcagcgcatccgttgtggacgacagaagaaggactgagtattgggggtccgaagggatttggattggatatggagtggacgaagttgggggagtactgggagccgagaagtgtgatcgaggaattcaatagatgtgagtgagtgttggatagaatctaaatgatatatactacttgttgaaacatccaaagtgagtactacgaagcacagagatgggatttgctgataaatgcgggcttggtcgtcttagataggcctcatcgcacctgatcttgacaaccctaatctccagaagacaacagaacgtcgcaatagataagtatagacatctcgacgatcctggcgatatttggatgaccaccagatagattcattggctagctcgtaacattgtggagacacatccctagtgcttattcccatgaggctaggatcttcgaaaagagaaatactcagcccttaagcctagaatacccaccaatgaacgccaaatcttacactgcagggtcggcccctcttccttttcggaatagtatttatctatcagcctcgtcagccgctgcgctatacacatcctaatgacgccgtaaaagaagtgatactgaataattggcggggatgaagaggacccatctgggggccaaactcccgtcgatgaaaatgtcaaggtataaaatgcatagagccacaacacttcccagaacaattctcttttcgctgtaccctcttatctcttttatccaagtgcatatctttcagcataaaaaatgacacaatctccctccaaaccagattatgatatcctcatcgtcggcgctgggttctctgggattttcctcctataccagcttcgcaagctaggctataggtgcaaaatatatgagactgcgccagacctcggcggggtatggtactggaacacctaccccggtgcccgtgtagatacagagagttttgtttaccagctgtctatcccagaagcatggaaggactgggactggaaggaaagattccccgggcgtgacgagttgcaggcatatttccaccatctggataaagtgctcgatattaagaaagatgtcgagttcgaaacaagcgttgttggagcgcagttcgaccgggatagcgccctgtggaaggtgaaaaccgataatgggaaaaccacgacttcgcggttctttttaccctgcgttggaacggtgacaaagcaatatgtgcctgatttccctggtttacagtctttccagggagagatatatcattcctcagcctggccgcgggagggggttgatgtgcaagggaagaagctcgctgttattggaaccgggcccagtggagtccagattatccaagaatgggccaaggaagcagacactcttactgtttttcaacgaacgccaaatctagcgcttcccatgggccaggagatctatacagtggaggaccaagcacgtatccgttctcgctacccacaggtctttgaagacagagcgaagacatttagtgggaatttggaggatttcctaccgacgaaattgttcgatgttccaactgcggagcgggcggccttgttcgaggcgaactggaagaagggtggattttcgtttattctggacaattactcggacatattgcttgatgaaaaggcaaaccgtgagttatacaatttctgggcgaagaagacacgcgagaggatagttgatcccaggaaaaaggatcttctggctccgctggaaccatttcatgctctcggggcgaaacgttcatcgttagagcaggattatttcgaacagtttaatcgaccaaacgttgatattgtcaatctccgtgaagtcaagatcgctgaggtcaaacccaccggtatcgctaccagcgatggaaacttttatcctgtcgatgctattgccatagctaccgggtttgatgcagtcactggtcctatcacgaatatgggccttataaacacggacggcacgtcgttggctgaggagtggaaggatggcgtccacaactacttaggcatggcgagccatggttatccaaatatgttttggatctacggagttcatggacctacggggctcagtaatggtccggtagctattgagcttcagggccagtgggttattgatgcgattcaaaagatcgataagagcggattgtcatacgtggaacctaccgttgaagcagagcagaagtggaaagagctggtaacccagattactgatatgaccttgttgccagccgtggactcctggtatatgggagctaatatacctggcaagaagcgagaacatttgaatttcccaggtggcctggcactgtatgaacagcagtgtcgacaggccttggaaggatgggaggggtttcaaactgtgtaggttttattttactcattagatggcatttctctcctagattctgtggattattgtaggaagatcgatagtcatgagatcattgacgaatgtatagtctctatacccaagtcttgtactattactatagtcgagccttaccactctgtaatacctcccaatcgccccttccaaacttcttatatgacggctcacctgggggcagccagtagaattgatcttccttgccctccgtgaccttagtcccggtcctatctgggtcgacgccttcatctcgtagcggcactttgttctgtttatgattgtggatatgggtcgagctctccacgatgcgcaggaacaccgggacagcgtacttaggaagtcgggaacgagcgaatttggcaagctcttggaagttgaagtttgccttagcctccgggcttatctgaagggctgcgcagcccgcgcgtccttcgtggtgtggaaccgtgacgccgtaaacattggcttcgaggatgccgggatattgaccaaggacttcggcaacttctgcggtagcacttcaccacagtcagttcaattcagttaactagatcaaggatgaaggcacttacacattctcgctcttccaccggaacgtatctcccaagcggtccaagaagtaccaccggccatctgattgacggcgcaaagcatcgcccgatctatagtaaatatcgcccttgcggaacacatcgcgcaggaacttcttggaggtcgcatcctcattcttccagtagccctggaaggcctctttgtttggaacattcacgatgatttcaccgcccgtctcgtaaggggctcgcacgacaaaccccgttttgggatcgcggaggacatcgcctgtattcgggtcaatggccaccggaatgaatacgttgttcaacagcaaacgcatgatcagtccgtggtgaccgacactgccggtcgtaaaggggccagtgttgtagttgaacaacgcgaagatgccttctgtgctattgaaaaactctccaacttctggtacgccaaagcgttctcggaacttgtcccaaacatccggacgtaggccgttgccgtacatacaacgcacccgatggtttcgatcatcaggcgatggtggtgcagcgagtagatagcgtgctgcctctccgacataaacgaaaaacgtcgattcagaatcccgaatgtcactccagaactgccgcacactgaatttcttacccagaccaataccccttccgctaacaacgcagttgatcatggcaattgcagatgtgccgtggtaaaggggcatacagctgtaccaacgatcgccgtcggggcctggtttgtccgtcaccatgccattagagcgtaggagaaccgtggtatataaccgggacatggtgaaggcacagcctttcggcatgcccgtagtgccggatgtgtagaggagaatagctgggtactcgccgtccatgttcaatgccagacggccattctcaggaacgtccgtgggaaatcgcgacagcacagtagtagtaaacgtaggatctacagtgataagctccatcccgaggtcgccctcaattgtggatttgcgctcgtctatgcgggcacggcactcatcatcatcatccaccagcaccagcttggcgccactgatcttcaaacaatgcagcaatgcatcgcccgacaagttatagttgatcgccgctggcgcgcatccaatactccacaacccaagccacgcgaagatgaactcggcccggttctgcaaataaaaggccacaagatcacctttcttcacaccttttgataaaaagaagtgcgcgtattgatttgagaatgccaggatttcacgatatgtgtatgatcgctcccgcgtccagatgcagaccatatcgggatatcgatcagcggtttctttgaagaagaaccagatattgccttgtttctgggagacggcgcgtgcatactcgcgctcgctccttcggacattcaaaaggctggagacatccttagcgatgtggaatttggcgttgaggtacgccgccaatgtcgctccaccagcgactgcagctgctgtagatatcattagagtggaggatctcgatcggaatcactatcatacgcaccgaggctcattttggtatgtgttctagttgattacaaagagatgacacctgcgacctaccaaagcagaaattgtatatgtatgaggggacaaaaatgcggagacttcgacgatcttgtactccttagccggcacattatagccggtattaaatgtccctcggttgctccgcaatcccccccattatataaggaagtcgccgatcttcgacataacatcaaggtaaaagtaatgcatagttggtagaagctcactaactggggcataaaatgcggggtccacctttaccctcggttttgcatccacgtactatgccgagaagagagttgccacgacgccgaatacgatggtcacgtcaactgctccaggctcctccctcatagataaggcctcgactgcccgaaaacgattgttataaacagaccatcttcccaggtacttgccaggagagaggtgaccgtttaggagattgcccccaggcctcgggtttgctatagatcatcagacgacgctgagtggttggtgctgacgtggaaaaatgggtctgaacgttaatgcagttccccacagaattatgcaagctgaggagcgagcaacccccaggaactatggcgagggttcaccaggatccctttttgtttgtttctcaacattttcatgtttgtttgcggttcaagtcccactgagagtgagtggggatcccaatgagtcaacaactttagccctaaaagttggctatcggcgatagttcggcccgacttgtgtagatagggacctcggtgtaagtgggggacatcagttccaaacaatgtcaagacctcaaaggtgatccacggcactatacaggatccgttagtatcactaatcatagatctcaacatggttcatccttgtggtctcgatagtaacacatgccgagtggcgagatactccgcggagacttttaaatccagctgaggacttgggtgcgaatgcaatcaaccaacttattggcgcaacgaatttaaaagcgatccggtgaggtgacaacagctagctagtggattgtttacttacatggtggcgtgatatgtttgatgtgtgtaatccagggtgtagtctggggtattactagggaaaactgccctagtctaaggcccaatgattgatacttgacttttttctcctaagcatcatgaaagccatatagggcgagtcttttaatacagcacacaggatagtagtcattcttaaattatgttaagaggggccccaagttaatagggcccacaccaggtaccaattactgtcctgcaaagatcgtcatggctaggataaccgccacaattagtggcttcagcctacctaggtcatatccctgcttattgttatgcttcttgaaggaattctcacgttgtcagtcaaagctgcaagcgactactataattgtacccggacatacaatctccgtatcaaccatcacattctcttgattaagattccccggacatgttaaccccggccaataataatatcactgctgtccagcacaccttaagtactatgccaagcactaataatcttgtccccgcgttgcggaacctaaccctgactcgtgcttagacctccaaccactactgccctttgtcatcccatttgccaagttcacgccaaggacaattgccggccttgcactctccgtaaacactggcgacatctagctgcggagatgataaagatacagagccaagcctgggggaggcagtgcaaagcttggactctggaggaaaaacgatgatggaatcatctctaacaccccatgcctcgcctcgtggcacaccttgacaaagcagaccatgctctagatgataaagaaatccagttagcactctgggcatcttcttgtttttcgacaaggcgactttcgagtatgaggtatatttggacagagtttgccaatctttgggctacactttatcttcacgttagtataggttgtgttaacgcgttgtaggatttggctaacccatggaagtagatatcaccgctcttggccttgtggatgtaaccccgcaatttttgtagatgtaatctggggtacaggtaggatctgcgatgtgacattcgtagtcgggtcaaggacgatgtaagtataaaagccctttcaatggtcgtctgtccatgtccttcctgttcccaaatccattccttcttacctctctccagaataacgagcctgacaagatgtctaacccagagaaattccctctctcagacacagacgaaaagcctgacaccctccaccgcgagtacaccctgggtcaagatggagtcaagtccccacaacaccagggcgactactccggtgcacggaagaaaacagaccctgtggagattcgtctggtccgcaagctggatacgtggatcatgcccaccttatggctcatgtactggctcaactaccttgaccgtaatgccatcgccctggcacggttgaatgacctcgaggaggatctgaacttgtcgtcgtcggagtatcagacttgtgtttcaatcttatttgtgggatatcttttgggacaggttccgagcagtgagtctttttggttattactggttgatgtagtgtgtgtgagtgtaggctgacctcgtctgtagatatgttgattacgagggtgagaccctcgtggtatatgtctggatgcatggctctgtgggctgttgttagcgctcttacagctcttgcgaaggacttcaagggactgttacttgtcaggttctttctcggtgttactggtatgttcttaccttccctcaataagtcccttagggagcaatctgcttacaatataacagaggccccatactacccaggtagacgcaccttgactccttgtcctttccatccagacatgtctgaccgtaaataggagctctttacatgctgtcgatcttctacacacgaaaagaaatcgccactcgcatctcgattctgtacacaggcaacatcctagcaaccgccttcgccggcctcatcgcagcaggcatcttccacggcatggataacctcgccggcatcagtggctggcaatggctcttcatcctccaaggcgcagtcaccttcctcattgccgtcctatcaatcttcaccctccccgacgatcccctagtcacccgctggctcaccgaagaagaaagaacactagcccatgaacgcatcgtagcagataccgtcggcgcgcgccaccaaaccagcacattcagcggcttgaaagaggctgcccgagacccgaagatctggctcttcgccttcatgcaacatatgcatctggccgcgaacggcttcaagaatttcttccccactgccgtcgagaccttgggcttctcgacgactattacgctcgtgctgacttgtccaccgtacttgattgccgggttaatctcggtggtttggtcgtggagctctggtagatttaatgagaggacctggcatattacttttgccaaggcgattgctatcttcggtttcatcttgggctgcgcgacactcaataccggggcgagatacttcgccatggttgtttttgcaattggtacttatgcagttaatagtattgtgttgggctgggtgagtagtacgtgtggtcagactaaggagaagaaggcttcgtcgttggctattgttaatactattgctaatgcttcgtttgtttggacgccggtatgtttcctttttttctttctctatttctactatggtgaacaggatatacggaagcggttgtgctgactgttgtagtatctctggccctcgtccgatgaacctaggtatacgatggccatgtcctcgagtgctgcgttctcgcttgcctgtgcggccagtgcgtgggcaatgaagatgtggcttattcgggcgaatagaaagattcgtcagggtaatgacgaatcggtgctatactatgcttattagttatgggtctgttgttccgaccacgagttccattactactatgtatctaagtgagctgtatgtgctgtatacaaaagcatcacttggtccgagatttcatagcctgttccatattatgtctttatcatattcacagtggtcatgatgtgcatcttgatgtgcatttccaaacctcttgtccctattgtattttctttgccccgtaattccatctcttcgtcagtagcatgcttagtagtgttcatctggtagagtgctttgtagaagattcggcgtagactagtgcatgaggcctagctgggtgatcactccttgttcgatgacgaactgcattccgaccgtgatacgctccttgtcgtagtattcgtacgggcccttgagctcgtagccgcccggagactgaaaccttcgatatcccagtaccatatttttccatctcggttcagtaatgaactgttcataagagatgttagtggtgcagaacaaaagatagtattagatgttaagatggaagaagagaagcagcaagaaaacaaaaaaactaagcgaaagagggaagcaaaaggacatgaattgttacctaccacgatgctgtttactccacagggctccggcgatcccagacgtttatcagtgcaatagatagccacgccagcgattctttgctcattacccgggttaaaagtaatcacgttacatgcaaatcgcgagatagatctatcgttcttggctttgccgactagctgtcgagttccatcactaaacttgaagagcaagccgccgattgctttgcccttgccgaaagggaagaatgccgtgatgcagtcaattacacgggaacgaaaatcgaggaactgtacagcagtctgggtcctcctgatgttgagttgcttcaagctcggcatgagtctcgcaggctcgttgtcgggcgatggccaattgccagtccagcgagtggtcgctagtaggtctccttccatatcccacacgaatcccgaagagcctgtagctagatctgcgacgattataccgaactgggatatatagtcttcctaggttgagttagcaattgcttttcagtaattctaccgtgtggttatacgtacggtgtattgcgcactcaaaccgaccaacgtttcggtagtccttgcgcatagaatgtgaactatgtcattattggtccaatgaccgaacctggcatagggatggtgatagttgccgtctgtcaatatcgcaaggccgtgtatcatatggtttgtgtgaaactcacgcatcggaccgagcgatataacgaagccgtttatgaccacgtcctttcgaaacgacacaatctgcagccagttggtttgatggcccacgagacgaccagacttatcgccttccagtagaaattcgataccaaccatgccgccatgcgccccaaaatacactttgacattcgtaacactgggcggattatcaatcacgggtctgatatagatgtccgtatttttcttagcaattgatgcatcacacaagaacgtcaccgctcgaaagctggagaggcctagtatctgtgttgagaccccttcgtaattgtcctggcttgcaacagagtcttcaatgtcatcaagtatccgatcaatgcacatcataattctacggcggttctgcaagcctaggtactcatcccacggtccgttcctgtcatcagaagtggtagtaacctcgattaaccgggctgcgagactcttatagtcaatggggtcttcggtctcggtcagtatcttaatgagcgtagtgtgttccatccagggcatcctgtcttcaatcacggagtaccagtacttgttgggcaaagcggtgctagccatacaaaaggccgggctcgcccgcagtacatcaaagagcgactcagatgggaggagatgcaagatcttatgacgcagctcaacggggaagcgccagaatcgatcaacatattcgtagtcttttgcttcgtcccatagtttggcatcaatctcctctgggccgtcgcgccttgcctcttccaggaggttagagaagtccggttcatagtcggggtttgtaacaagccactaggaccgggtaaataccttcagcaacaagacaagcggatgtagagcatacacacctcatagccatctagagccgtccacctatgtccttggaatggcccagcgccgccatagtagcgatcaccccagttgataacggtgccattgctgatacacatgcgcatttccattcggaggaatatctcgcgtcccattgtggtcatgtgcttatcaatcatgcccatttgatggagcatcatgaaacacgcattatgcacaatgaatccatcatcccacgccgcgaactcgagttcattttcaaggccattcagatttgttcgaaagagacgggacggctcgtattcgtatgttccctggatgtgcttagtatacaatttataacttttcagattatgattacaagtactagctcacagcgggtgtacttacgatcatactaatgtagtatgcaccttcttcgtccgagtcctctccatcatgaatattggcacgcacgagcctggtgaagttgagccactgtagatctcgtcaggtactggggattacagtaatttaacttcggggttttgtcccatacctcagtgtcttttgcagtagtaagacatgggtcataggaagaatgctggatgaaattcgtagagagcggtcctccgcaaatgttacagaaatgctcgccgtcctccattttgatggttggtcaacactctagatccctaaacagggatgagaagccttcatgacacaggaaacactgaacccacgatagttatggtcttggccctgtcgctgagctcaaacgtgagagaagcctatcttaaggcaatgtgattgttgattaggctcgtcacacctcacaacaaaggaaagagaaagaaagcccacggtcggcaagagttcgcacaatcagcattaccttctgcattcaggctgctaagtgttactggctaatgaagagtgcctctgaacacaaccaatctgatagatggtgaattgcctcggagcgggagaaccgaatggccggtgagcttgggtgcacatttgcatacatcaacaacttgactgatatatcatggccataggtgtgtgataattcacagctcgcagcttctttgttgagaaaaaactaaggttagcttggttatcaagagaatggtctcgaatgcctatctatattacctatatactagctgccaatgaaagcgacgccctatatccccaacaaagtactaaaccgcgagttgaggacgatccctaagtcatacaaaagtctcgaaaaactctcgttggcaccagcttctcatgcactccccccttgctctcgtgggctggcttccacgcccaggcctgatccttctgcaggccgttgctaacaccgttcagaacgttggccacgtacttcccaattgttgggagaaatttgtaaaaatggaacgagcctcctaccgcgaagtacaggttcgcaaggctaggatttgggtgtctagtgatgattggctgttggtcgggggtaatagagtcccagcaaagtcgataataatctggtttgcggccaccgtccagaacctgaggtaaacgtggcctaatcagattcatcgaatcctcttggagacctggcggagccattgtttggtccggaacagggacggatatctcatgaccagaggctgtgctgattatatttttgacggacgtcgcaaatgtgaatttgaggatccctgaatccgttggaggtattacttctcctgtttgctctcagcatgcgcccgttcgattattgggctttaacaaaccttgtccgccatatacaaacaccggtagctgcgagtatgcttctttctcggcttccgagagctgaaagtgagcaacgcaaacgccagccgcagatgcctggttctctactcgctcttcgtcagacagttccagctcatcttcgacggaagacattaactggcttgtccatgctcctgttgctagaaggatcttgtctgctttgaaggctgcaccagtatctatttcaattgcatgcatcccgccttctccgcagacaacccttcgtgcctcgccaatctcatacttgacgcccatcttcacggcttcattagccataatggccaatgctttcccggcatcggcccatcccgccgagggattgaaatagtaggacccaaagggactgcaatctgttctctgaagcagtccaccccagcgactctttacctcttcctcagtcatgtcgacgatcacgtcatcacggccactctcggagaagttcttcctgatacggtggggcagatcactgtctttctcatccatcgcaatccatcctgactgatgatagacacccgcgtcgttgaaaaacgggagggacttccaagccttgatggcttcaaaaccaagagtcatatacaaagggttggagtaatccgcgcggataatcttgttgatatccgttgacgcggcagacgtggaaggaggggctccccggtctaaaagcgtgattcgagaagggttggaactgctacatgctaggtaataggcggtactgacaccaaagatgccggcaccgacaatgagaatacttttctcgctcatatttggtgttgtggatagttcaaggagtttgttgccgatcggttgggttgatggttgaaatgaggggctgggaggggtcgtgattttatatcgcgagtgatatcatcccaactatttctgtatcgattaacttgttgaacagcaaccactacgtatacctacagaggtgctctaccgttaccgttatttactaagattaacactatcacatacacagtgatcaagatcatacagaccagtcattcagtgctcatccggaccttcagatcactatggcataataatgagcgtttgctaacctaaacccatcggagaaaagctcctcgcccatgaatgcaaggtataaacggcacagaccccccagaagatgtatgtcccaagcatctaacttcctgtctagaaccacgattccacggttccacatccacatttactctggctataaagaggggtctaacatggtaactcttaaacatatccatatatcaacagtagccctcccagtacccccatcattagccttttatcctcgactcccatctagtctttccctacagaagaagagagaagagaaagagagggaaaatatccaaaatgccctcaacagccagagtacccctcaacctcgaggaagtcttggacatataccccatgttcgaggatcgatgtcaatatttcagcctttcccgtttccgccgatgcaaaaatagaatcagctccgcctcccgccaagaagcccttagattactcgatctaggtagggagtatttcactgagggtcaggatatagagtatatcttgagggatttggcttctgcgctcctttgtactcaatgccgtcagtctcgtgtcggcagactagccagcatgtggagcgacgaggtgtggaggtacttagttgattggcatggttctacgattactgctaatacggggaacggtaaaaataggtctttgcagaagcagcggagagctgaagctaaagccctccgctcgaacgttgtacgtggaccgatgcagcaggcggagcagacacagcaagcgccagtggaggagaggcgtccacagcaacagccttcaggaccaatcatccctacccggtgctgggaagagccggccaatcgtgtgagtgagacgtcggtaagcacgagctcgggcttgggtcaggctgctagggtctcgaatacgagtgttgtctcggggtcggtggtaccgagggcggttgagggtgactgcggcatttgtctgttagggtttcttgttgacgtgactggtgggtcagccagagagtacactgcggctgaaaagaagctttacgagacgaattatgattaccatcggtgggtgtggtgtaggaatcactgtggcacgaattatcatcaacactgtattgatcggtggattaggacgtcgagtgttttgtacccgaaatgtccgacttgtaaccggttttggatttattgaattggtttgattatacgagagctggttttactttctttttttcttttttatttgacttcaatggtccgtttttcgtgttttattggtcttacttcctgctccgggtccaatagtctgttatgttcttgtatcacctgtcccaagtccaactatatacaaaatacaagttttacagacccacatcgtgatcaatacaaaagcatattcatcaagcattcaatcttcttccacctttacagccgtgcagcctttttctccgtcattcggttcaaccaatattggatagtgtcgacaaacccgtcgatttcctccatcgtattacccgtatggagacacacccgtacccgttcctttcctgcaggaacagtaggtgccatgattgcacgaacggtatacccttcctgctgacatgttgctgccagctgacgaggtaaggggctgcgcagggaaaaaatgggggatctcgggaagtgatctacttcgaagactgctgggtcccaggtaccaagatcttctaatctggtccgcaggtatgagatcaattgttgaagtttgtgttgaaactatccatgtcaatataaacactcgatgtatcaatgtatgcctgcaaaactcacaggttccgtgatcccttcggacaacaattcatatgctgtgcggatggaagccaagaacgggaaacccaacgccgtggtgtagatcaagcttcgcgcatagttgatcagataatctcgggtatcggggcagcacaatacgatcgctgaagaactgtcagagacataaatatcaaatgaaggtttcttgatcgcataccaccatgactcgctagggctttaccgaacgtatgaacgcggataaatatccgctcctccactcccagttcctgaactatgccagccccgcgtggaccgaatgtacccgtagcatgcgcttcgtccacgataaaatagccgtttcccctcggcagcaggcgatcgacaacctggatgaattcgcggatcggcgcaatgtccccgtccatgctataaacggattcaaccacgatgaagacattccgggagccctcttggatcttgggatcggcgtcgagctctgattgtaggacaacttccaggctctcgggtgagctgtgagcaaattggactcgtttgcctgctcgggacaaccgcatgccttctcgtgcgcttgcgtggatcagctcatcatgtataatcagatctcctggctgaggaatgcaggataagacgccgacattggcgtcgaagcccgaattgaacagcagtccactgggggcaccgtggaaatcggcgatgaagctctcaagctcctcagcataagttgaattgccatccaggaggcgggaacctccactggcaaaggggtggagaggaggtgcctgttgcaggtggtctagtaaccgggctcgatatgctggcgacgttgatagtgacaagaagtcgttagaggagaagtctaccgacgtctgagggagcactgtgagccttcgacgagctgatttcagttctctccggtgtaaagcctgacgcagtgagtcacgcagggacttgggcgaggagacatccattgtgactaagttcgagtttaagtctctcaaccggaagcactaagtgatttaccacacccaagagggaaaggggcacgacacagggtcctcttataggcatggtgcctcccctccggatcgaggggatcgcgggcattatcatccttgaatccttcacaccggagacgtggagccggggattttcacaatgaactgcgcctaaagagtggagctactctttcccgtcatttggtggcttgctccgagttgaagtctcaaacccttttttccttcttgattaatttcctgattatcccacgtaatttaatgaaatgagatcattaatctttacaattgtaagtcacattacagtgtatactctggtaatcgagatatatttatagaaaccatctttgaaccatggacaagatcagatggtattttttttttttaatcataaatgttggttcggtagatcagtagctaactatggggacaaagatacctagggtaagatgcaggctgttttgagtttgacacattgaaggtaaactataaggcgacccgccaaaataaaggggattcctcttgaaaaagttggaatgcagatgtgaaagttggagcgcgggactgggaaaaacaagaaaataccaagacaaaaaaacaaaaagaaagaagaaaaaagagagaaaaacaagagggagaaaaaggaatatccacaaaactcaagccgttgaggaccaaccggtggggaggcggcgggctgcctgaatgcctggacagtgtggtttcctccgggctgcctgagtgaataatacctcgggccaattcaaccaacatctaaactaactctggttctggatcttcttactcttctcgtatccctgacgatgaagtaggctatacacagtactatttttacttttctcactgttcttatcatcattattaatattactcactcctccttcccctttttccgcttcctcttgttctcgatcattcgatgtgtgcttagtagtaccatctaccagctctgactgtgatgtctccagtgggagctgttctctggcgctcccttcgcgcccatcaggtttacggcgccaacactgatgtgggcaaaacaattgtctcgaccgttctctgtaacgcggttcagcgcctaaagtcacaggatcaggcagcctttctgaaaccggtctcaacggggccattggatgacgcggatgaccggtacgtggtgctaaatcctgcttagcaaccaactagtcacatatactgatccgtgatcttagacatatccaacgccatgctgcgggtacattgactaagtgtctctaccaatttgatgagccagtcagtccacatatcgcggctcagcagaagaagttcaccgtccgaaaaccattcactctgactggaggtaccaaatactgacactcgacagatcccccgggatgatgatatcgtggcttctgtccacaaaaccctctctgactgggcgggcagtggggtcaattttgccctggtagagacggccggcggtgtccattcccccggccccaatggcaattcccaagcagacctttatcgcccactccggttaccgattgtcctagtcgcagactcccgactgggcggtatctcttcgtctatctcggcctacgagtcacttttactccggggctacgatgtccactcagtcttactgtttcgtgatgagtactacaagaatcatgaatacttgctgaactatttccagaagaagtgcattcctctcgttccactgccttcacctcctccaaagccatcagtgcaggatgcagattccttggcgcgggatgaggaagccatgactacatactatggtcgcgttgcacaggaaacggatgttgcgagtttattacaacaactatcttccaagaacgcggaaaggatcgaccgtctggaatctatggccagccgggcacatgacaccatctggtatccattcacgcagcatcatggcatggaagctaaggatatcactccgattgattctgcttatgatgactattttcaaacatttgtgggttcggacgagtcacagcatgaaaacaagctgcgcgcaacatttgacgggtctgcttcctggtggacgcagggcttaggtcatggtaacccgagtttggctttgtcggctgcatatgccgctggacggtacggacatgtaatgtttccaggaaatatacatgagcccgctttgtcgctggcagaacttctgattgagagcattggcaaccctcgcctccggaaggtgttttacactgacaatggaagtaccggcatggaagtcgctgtgaagatgggtctccgggcggcatgcgaccgttatgggtgggatgccagccaggagcagatcagtatccttggcctcaagggaagctaccatggcgacacgattggagtcatggattgctcggaaccttctactttcaacaagaaagtcgaatggtatcgcggccgaggatactggtttgatttcccgcaagtgaagatgtcgcaaggagtgtggaaggtcgagattcctgagaacctccgggagtcattgggctcaggcctcgaattctcttccctggatgaaatctttgatatggaggaacggctacaatcggccgcgggaaagcgctaccaggactatattcgaaatactattcaggatctggttcaccagcacagaatgaagtttggttctctaatcatggagcccatcattctaggtgctggcggcatgctgttctggtcagtattgatatgtatggtcaccaagatccatgactaacggacttgtttagtgaccctctgttccaacggtgtctcgttgaggttgtccgcggccatcctgagctgtttgacactagcgcggctaagtctgccaaggaccatccagtggccacctcctggtctggtctccccgttatctttgacgaggtgttcaccggtctttaccgccttggccgtaaatcctcggcctcgtttctccaggtggactccgacgtctctgtgaacgcgaaacttctcactggtggtcttcttcctctatgtactacgatggccagtaatgaaatcttccaggcattttcgagtccggaaaagagtgacgctttactccacggacatagctacacggcacatgctgtgggctgccaggtggcagtggattcgctgcagaccatgatgcaaatggaaaacagtggatcctgggatgggtaccgccaggactggaagccaacccggtcagactcccctgcgaccctgagcgcgcgggacagccccgacgtctggagtgtctggtcccatggcttggttagtgatctatcgcatgcaccatcggtggacggcgtgttcgccattgggacggtcctcagtatctcgctgaaggatgtgcagggaggaggtaagtcatccatgcggttccatccccggtcagcgcgttccggactaacatgtgacgtctccaccgcgcaaataggctacacctcgacagccgccagaggcttgcagcagcgattatcgacgagtgacggagagtttaatgtgcattcgcgtgtcctcggaaacgttctgtacctcatgtctagtgttacttctcaaccggaggcgctacgctccatcgaggggttgctgcgggaggccctcttgtagtaaatgcctgtgtaatttactgtacattggatacattgctgctaacgcctcaccaaaaatcaaaagggagatgagaaaggggaaataaatgcctgaatgagattaacgagttatttttttttttcagtgaactgaattaaatgaaaccccccgtatggtttaccttcccgggagagaattgagttttccagtgcttgttttgtacggttattatcgggtagacgatgacgatacggaggacaagatactctggtacggagtactaatgcccgagtgaaggtcaattgctccgtactccggaaagctcgtagttaaaacactaagtacagtaccttggaagcgggaggatgccctagtgcaggtatatgtattactgtaacatttggaccaattcccctcggtatttgttggattattctctattgttggtaagaccgggacaacatggcagtgttagtatagtgatcgtagggtgggaagtgcctggctaatgggcgatcattttaaccttggaacgggagtgtcatcatcgttaatgggctttcccggtgactcaaaccaagttaaccttcgctatgtttggaaatctcccaattcgttcgacttttcgttcaccgacggcccgagggtcaagaatgttgccgcctgattggcctgattatggcacgtgatgacgattaaggggaaagtcagaccgaaaggtggaacagggatcctcaggcaacattccatgtttcctttcttccgataagcacaattaaccatcgttctccggtcggtggggatcctcccaccaatacgtaactcgcccgctggatctgcgcgtttaatccacagcctccgtcaacgatccattgacccctcaacagttggtcattccagaatctctccttggcgggaaatgaaaagtgggcatggtcttcgaccccccgatcaagggaccacccccgtcgtgatggaaggatggtgttgatgatgcgtattcttcaaccatctactaaacattgtttgtcaatgggttgaacccctcgttggggtcaacaatccacgataacagagggaaagtgacttctgttcctgagccacagctttatttgcatcaggtggtcgctgactgggtgaaatgattagactttccccccactgtgagtaatagcaggtagtcaaacaatcaacaaccaacagccaacttactccggaataacactgcagctctggttccccccgccggtgagcacgatcgtactactactactatctacccctctcatccacttttcgtctgtttggctctttcccgaggttgtggtctttccttcaccgtcgcttggcgtcattggccttaattcttcttgggagctgtcatggtgcctttgtgttccctctaacctaagtactgcctttcttccactcccattggacttacatcactctacactacaatcaccatgtcactcctccctcggtccgtgcctcggatcatcctacgaaggtcctatggtaccgtccagtcctcccccagtgcggcttcgattgccagcagaatccccgtagccctgcaagaggcaacggccgcaacagtgccccggactacatggacccgcgaagaggtccagcagatctatgagaccccgttgaaccagctgacttacgctgcggtatgtggctacttttccaagttatctcgctttgtgtattgtttgcttttgattgttctttcaatatgataccgcgatcttggaagcaagttggctcattcaaaccaggctgccgttcaccgtcgattccatgatccgtccgccattcagatgtgtaccttgatgaacattaagaccggaggatgtagtgaggattgttcctactgcgctcaatcgtcgcgccacaacaccggattgaaagcgacgaagatgagtcccgtggatgatgtgctgaaagccgcccgcattgccaaagcgaatggaagtacccgtttctgcatgggcgcggcctggcgcgacatgcgcggtcgcaagacaagtctcaagaatgttaagcagatggtgtcgggcgtccgggaaatgggtatggaggtctgcgtaaccctgggcatgattgacgagaaccaagccaaggagctgaaggatgccggcttgacggcttacaaccataacctggacacgtcccgggagttctaccccaccatcatcaccacacggtcgtacgatgagcgcttgaagaccctctctcatgttcgtgacgcaggaatcaacgtttgctccggcggtatcctgggcctcggcgaggcggactccgaccgtatcggtctcatccacacggtttcctctctaccttcccacccggaatccttccccgtcaatgctctggtccccatcccgggtaccccactaggtgaacgcaagatgatctcctttgacaagctcctccggaccatcgcgacggcccgtatagttctccccgcgacgatcgtccgcttggccgcgggtcgcatctctctttccgaggaacaacaagtccagtgcttcatggccggtgctaacgctgtctttaccggcgagaagatgttgacgactgattgcaatggctgggatgaagatcgcgaaatgtttgagaagtggggcttctaccctatgaagagtttcgagaaggacgccgacgcctccgtctcgaaggaatccgctcccttggaaaatgtatccgccgcgccggccgccgcgagttcgtaaatagttttgtctaacccctccacatctgagattatcaaatggctctacccgtcctcgtatgagtcaatcctatgagacattattatgatccaatagaaatcgttcgatcgaccgctatagaggcctggtcccctccactcgtagaattgattcgaccgcgggctctgcccatgtcttggaaatcccttggcaggtatttatgatgcggacagcggtgcaattgctcttgtctgtaacacttagacaatgacggttgcctaatagttatcacatgaggctggtgctgtgttgttttcccctccaccgtgtatttaagggccctgtcctgccacctccgctctcattttcctccccaggcgacccttccgactcgctcggagcctgatctacagggcaatatattttctcttcgtgtggctggttttaccagatcactactttgctcgtgagactaacaagtcttctaagctgactaacgtagctgctgtcgcagatgatgctcattgatttccgtctccgcatgatagacatctcaagagaactaaggttcgtgcactactccactcactgtttctacaacgaacatcccgattaaaaagagaaaaatggtatttgtctataaactatgctcattaagtatatacacccaactcatgataacgtctctgagggataacattaatcattaacgcaaggtgctgcctcgataaccctccgagggtcttctcagccagatggacaaatgaagtcgttgaaaatcgggactcatctcccgtacaagggcgagcagattcaaaatgtgcaatgaagtcgcgatatcatctatttaaaccatggttttttcgaccttcaagtcgcttgctgtttgtgtatcagaccggctcatcgtggtgtaccggctgaagtcgttagggagcgtcttgttttcctcgtccttgtgacggtacgcctggcgccggaaaaagatccgcttgcaccacttccacgtctcaacgcccataaagaataggatcgcctccacgaataccactccccattcccaggagatgccggtgtgcttgaaaaccacatggttgagcccaggaatatatagaattgggaatgtggtgatgaacccgatcatgataccggtgaaaagaaacttgttgcgccaaacatcaaacatccactgggtaaagtatctcttcgagtcaggctgcatgcggaagaaactgcgccgcatgtcaatctgctcccacgccaggaagagcgcgaaccaggtcatgcaaacgaatgtcgttgcacgagcacggaataccgtgtcacagttgccattgtagtggtcgttgccattgtagccagtgttgcagccacttccgaggttaccatcaccccatccatacatcaccagggagaaggatgccaggcacagcgcagccatccagacaccatatacaagagtgtccacaatgacttcccatgtgaagataccttgtttctgttatgcgtgttagcagtgggcccaggttgagggtgaaggaaaatgttaaaggaagggaagtacatacactctggggcgggcggttcatgatatcgggtgccgcgatctccattcccaatcccatatcagggagaccggaggtgatcataataatccagagaatttcgacgggcgcaatgggaaacacagactgtccgttgacatccttgaataccagaccaatgagcagagtgagcgcgagtccaacgttttcggccaacaaatgcaggacgaatttctggatgttatcaaaaatacgacggccctcttcaattccgttgatgatagaagcgaaattatcatccatcagaaccaattctgaggcatcctttgccacgtcagaacctgcctgtcccatagcaataccgacatctgcccgcttaagagaaggtgagtcgttgacaccatcacccgtcattgccgcgtaccgaccacgacgatgcaaggcgtcaatcatgcggaccttcgtatgaggcgcgcagcgagcaataaccaatgggagagtagggagattatcgatctcgtcctcggtcaatttatcgaactggctggccgtcataaccattgcatccgccacatccttggcgacgctgtccatgtttgcaggaatgataccaacctgtgctgcaatagcacgcgctgtaccggggtggtcacctgtcaccatgtgcacagagattcccgcgcggtaacattcttcgatggcaccggcagtttcggggcgaggggggtcataaagaccaatgagaccgcagaacgtgaggtctttctcgacttcctctctagggggaacttcctctccgttggtgggggtcttattctcccggcaagcgagacaaagcacccgcaggccttccttggccagagcttccatgttctgcaggatctcttctttcatgcttccatccaggggaacggggctagaaccagcggtccaggtgactgatgtgcaggaatccaccacacgttcgacggcacctttggtgaagatcatctcgcggtcaccttgggcgaaaatcaccgacattttcttcacggtcgaatcgaaaggatactcggctttctgggtccaaactggcttttcgcccttggtccaacgatcacggccccagttgaaacgagacgcgaacacctgaatggcgatatctgtgggttcgccacgcgcttgccattcatcagtctctgacttgtgaacatgggcgaggttagccatcgccgcgacgttgagatagtcttccagcacctggttctccttgagtagatcttgagggtcccgaggctctccttgtgtatcacgttggagctcaaccgggggttgaggtagcaggctcaagtctccttcttgggggttcaacggatcgttagaggatcccacggagtatgtacccagtgatgggagccaagcccttttggcaaccatgcggccctgagtaagcgttccagttttatctgagcaaatgttagtcacagcaccgagagcttccaaggagtcaagctttcggacaatgacatttctttgtaccatctgcttggtgcctaccgccatagtaatagtcaagaccaccactagacaagcaggaatcatagccaggccagttgccactgcgtagatgatgacttccttatcattccgcatctcgtttgcacccatgaccacaatagcgaagaccactgcgattgcgaagagcagcaaggccaacttggagagcttcctttgcagaggggttccgacattgatacccaagaagcgaccgaccgcatcggtgcaggtcagggtccaggcttccacataccagcgctttttggtctcgccctggggaccacgcttgacgggccgtctcttggaatccccggcacggagagccgccgcgatggcaccgatttccgtcctcattccggtcccaaccacaacaccgcgggcacggccccgggtcacggtagatgaactataagctatattcaggcgatctcccggtccggtatcagggtcgaacacggagtcgacctctttctgtactggcaaggattcaccggtcaacaacgcttcgtcggtttcgaaattcatagcatccacgagcctacgggcgcgattagctgggtcatttatgggagcgaacaattctcgatggttacatacctaaggtccgcggggacagtgtcaccgactttaagctcgatcatatctccggggacgatctcggtggccgggatggtactggttttgccatcccgagtcgccacaccagttggagaactcaaggagcgcagggaatccatggtcttttccgctgcatagtcttggtatacacccaccacaatgttgagggcgatgacggcactaataacaccaccctcgatccacgattgaataccgaaactgaccgccatcgcaatgatgagaacctataattgttgtcggaggttagtccattgatcgaaatcccgtgtgtataaggacatccacgtaccagcatcattgcattggcaatttgtcgaatgataatcttaactagggagaccccttctccgccctccagctgattggggccatactgactgagacggttcttggcgtccgccgttgtgaggccttcctccgagttcactttgagctcttggaggacggcattgtaggagagggcatgggcgggttgtgataacggctgagcagtatcaacctgcttcttctcgttggtcatgttgttgtatgtctatgtgtagttgtgtttgtatcaatgggttcagggaaaggttgtgtgatatgatagaatctaacagtggggcttgtccttagggaggctccatatagattgtatcctccaggcaatgcgagtccatacacctacacccggtagagaatacaccttggaattggagtagctatggatcggggaggaattgagggaggagatttaaccttttctttcttttccatccgggaggaggcggggagatctcgggtttatatgttgctcttggatcatgacgcgaacaaagattcacctcttggcatggattcccttgattatcgagaacgggggattgaaaaagccaagcgccaataagggccggtagagcacgagagtcttggcgcataaccttgggtttggaggcaaacgatggttggattatgacgcattcgaccaatgccgtcgccacgtgagcgtcgcttaacgctgggcagaggcaaatgactggccagaccgtcgtcgacccagcggaatgccaagagggttccggggcgcgggaggcttggcacctcttggattatttcccgcctcggcttctctgcacgcttggtcggtcttggccaatacgcaactggagggggtctgagagccactcgccgcttgaaaagctgcccccatcgctcttcgatttcggccaaaaataattctacgtcgtttcctctgactggttactcgtcccccctccctcctcccttccccccactctctgctcttatcgtggtcctgacccggccctatgcgaatcccgacgccgctgttcgagccgacctatccgatcctccatatctgatacatcttattggatctgttgccagttagttactcctcttgtcgttctcgtattgacacgagacatcaccaccgtcgtgtcgcccgtgctatggcgggtgatccgcccggctctgaaatcgccggtgtcgtggtcggagcagtactgctctttggcgccattagcttggtccccatgtgagttcattcgttgagtccatgatccccgctgcaggagagaatcttccatgcatttcgattgggactggtcatctaccaatgtgggcggttgggtctcttcgcattgtctcctttttcacaactactacccagagatatgatctattctgccaagcaccagcaaatggttgacaacccaagacaggctgattatgtggcatcaccgtcgacgagcggcggcgagaagagctgctgaagtgcacctactccaggtcaatgggtgcatgcgacaggtgacggtggagcgatggctggaagagttgacccgatcggaaaatggggagcagcagcaacggcaacggcactacgctcaagaaacctggtagggttgcgcatcccattgttggagcacgtcgggagtcttggccctggagatgcggggacagggctggcactagtgggcttggccgttatcatcaggacccgtttcgttgtgttcacgctctctgatttgctttggtgctttctcccagttccatctgcctttcgactctcgtcgtcccgtcgtcttcgcaagacacgctaccgtcctctccagaacccgcctgcatccttcctcattctcgctcgaccaccgctctccacagtcacgacacgcttacccctgacgctgaccctcctctgctcgaatcagatcgcatgcggtaccgctaccgcgacggcgaccgcagtgtcctcgttctgaatcagtgtaaccacgctttccacgcttcctgtcttgcgtcatggttcgcctatggccagtacaagtgccccatctgtcagacggtgtattcccccaccgaccccggctaaatttctgtctttctcctcggactctgcgtctcccactgctgatcgtccagacggattgcgacatggctggttccatgagctgcttggcgtcttaattcgggtcttggtgttttttccgttttgtgattcggatctgatctatctttttatctctttcttctgatctcatccggtgtgtaatcttcccggtttgggggaagtcaatgtatgtatgtgctggtgccagtgatgtaaatgatgtattgtctactcttgtgtgtgtgtgacagattggccaattagtattttttttatttatttatttttttaatgaagatgataacatacccgcctcttcccagatttcccaacaaagaaatcctaaacgcaatgaccagctcataaattttaacctgcacatatccacatacatgcatacatcgaggtcacaagacatcgagtcatccccaggaaccccagaatcggagacatacattcaccacttttatgtcagaaccatgtcaatagtaaaccttccctacagtctaaactcaaaagtaagcctagacccatggattgaaaagtcagaaagttaaaataagggatttcgtgcggtcagctatggatggatggtacttgtggtcaagctttgcagtggatgagattattatcgtgggatagtatataatgttataatggatgttagggtttaggaataatatgattccggtggagatagggttatccgggtagaaatataatctaatccatctatctaatatagacagtagaatgagtagatcttactccataggactatactacttactgtaagatgatgcatcgatcaaaatcaaaaaggcaagaaacccgaacggatatcccttctctactccttagaacctaaactaccttaaagcaacccagcagaactaaagcaataacaatgaataattgaattgactaactgaatccgtatacgagtcgcgtatggcgctaaatcccatcctacatcttttcccctccagccttatcctataataatcctgccaacaggaactaatgtcccaagatgcatggcgcccatggtccagatgaggggttgtttggccccgccaagaccttggggtttctggaagtattctggaatgttcgtttggggctgaggagatgtggtcgtgtgagatggtgttggtacttggtactttggttggtgtgcttacttgctgggatatgtactgtccttgtagttgttgatctatttgctggtgtgtgctagattgatcggatatttccggatgtcctcacttgggtatctggattaaatcgggttcttttctatgattgactctggctatacctgtctagatccaatctctcaggtgcatcgatctataattatggtatatctaacccgtttattatcttcataggtgggacggaatcggcgggtatactaaatatgaccttccttgttttaaagcctttatctcttattctcgtggtgtatcttatctcttacgagtcaggtcggtgggatcggacttgcttgttttacttccagcgattccggggacagctcatatctgatctcggtagctggatgggtccctttctatggttggggataccctgtttgcagatcgtggacgagactacgtggctcccgtggtagagggatatccttctagatactctactatccactaatgtaagcctcaataaactcagacccttaataattctacaagacagaactcacctccggaagaacccggaaacaagaatctaacccagtaaacagaagaaagaatctagacctatcatcggagaatattttcctctgggtgagtggatcccacctgcattacatggcaggaacgattgcgttgggttcgtggtgtccacgtattggcacgacgtggtgatacggcatggctgcatctggatgtggactgttctcttaccggttctggagcgttggtattccctggagaatagccggttttgtggctgggtttctgtgctatgtgctacttgaggagggttttgagtctgggttcttggggtttttgtgaaggtagagaggatgtagttgggtttgggctcaccgcttgggtttggtggtttggtagagggactggtcttggtgtgggttgttttgatttctgttatgagggtctactgggtgagagaggtgatggaatccgagttactgagttatttgatagattctcttagtaagttagatttctgtttcgcctttatgaatgctgactctgatctatgtcttcggctttgagcggacaatgaaatctgagagtgagttgggtatttttaaagatgtattctccagatacatactgctcacttcccctagacgatctgaatatgctgactatgttgtagattgttcaacaggtccttgttcgaagaacttctcatgatgtagtgcttttcatccgttggcgatttcacacattgagagaacctcatctacggcacctgaagtcactgatgggctggtcatagcttgttgctcttgcatttcaagacagagctgtaagtctgagattttacgaaatcagttattgccgttggctgagaatatcgcaattgatggatactccagatacatcagattactatctcttgaggaggtgaagatgcttagaaaaatgtgatattatttgtaacatcataaaccttacttatatcccaaccatcccctacctttaccaaatacttaagtcgtccctctcaaagtccttcttcacttgctccgcaactttatcatccaccaaaatctgacatgcaacaacggccataccagccgcacaagcaagactacgcttatacccctccggcgatccagcaccgttggtaaactgtggcgtatgattcaccccctcggctggaatggtgaacattccatgaaagccgggcacggcataggtgacgttgcctacaagacaaatgtcagtactggtttctggagctgaatcatggccagtaatacgaacccatatcggtagaggcgccacccaagactcccttctttcctgaattatcaaaaatcgtatggtgtcccattgcgcgcatggcggtaacgtaattctcacagatgggtgtgttggtcttcagatcggcgtacgagatgcccctaattcacagttaatgatgtggtctgaagccctgtcagaagagaaataacataccaatcaaactcaactttacacccggtagcagtcgcggcagcttcgaagcacttaatcaccttttcggtcaaaggcttcaatgtcttgagactgggtgaccggatataatagtccacagacgccgacataggaatcacattcggtcgatctccaccgtgcgaaataaccccatgaatccgctgactgggcaggatctgctgtcgcagcagagaaatattaacataggccgccaccacagcatcaagcgcattaaccccctcccacggcgccgcagccgcatgcgccggcttccccgtaaacgtcaccgtcaccttatcattcgcaagaaacccacccggcagcactgtcgccacactcagcagctccggatcatcaggcgccatcggcataggatgcaccatcagacaagcatccacatccttgtacgctccattctctaacaagcgcacctttccaccgccggattcttccgccggcgtgcccagcagtcggacggtgtaccccggtccatctgggtaccgggccttcagggcctcgcaggtcgcgatgaatgccgcgattgagcttgttgcgattaagttgtggccacatgcgtgtccgattccggggagggcgtcgtattctgcgttgaaggcgacaacgcgcccgcctgtgccgtgcgtgtatgagacttccagggctgtttcgagtccataggcgctgcggcgcacttcgtagccttctgacttgaggttttcgaatagtgtgcagatgtggtcgtgggctttgtattcctcgtagcctagttcggggtttgaccagatctagataagagttagagataatgatgacacagatcgagatagtattagttagaggatacttacctgatgattaatactcttcaactcggaatcatatttctcaagagccgtctgaacgctctcgatcaaacgatactgatactcttgaacgtgcattttgtctcgatagcaatagcaggggttagatcaatcaattgcttggtttggtccacacgaggtgtgtcgtcaggtatcttttatatgttcccagacatgcttcgtctccacttggatgatgagatgaggacatttctaattcgactgctcggcaatgcttcgcttgttgagaccaatcatgtcgttactggatttcttatcgcggactgaatccatcgattatctcccggcctacctggcgataggacggatatcctcatgtcgtgacccacccggaccacccccgctatttctcctcatgcgtctttggggtcacttcgtcagccgaggcgattagattgtgtttgttggttcagagtatgggaaacttggagaatgggtgttatgtctatccttgtctgtgagatgttttatgaatgcttgttcattcacaaagactagatatatatattgagtatcggcactagggcatgataccacaacggaggaacacatatctagaacgccataatttttagtcctgggagctactttacacatagagtactatctaagcataaagaagataataaacatataatcagacgatatagctaatcgtatatcccctgcacttacgctttacaggagaatctttttggcgagtggatttatatcatcattgttatacttgcaaatgtattcaaagtcccaagaagaaaagatcttaccctcacatgtgtacagccggtttagatatcaattgagcatgagatcttgttcgaggaagaatggctgagagaggtattgccttgcttattcttcgagagaagtgtctggttcttcgtatatactaagtacagatataccttatcaaggagtactgacttctgagtcagagcgagtcagatacgaactgcgtgatatacccttgagtcaatgggctggcgtcttaccagatactgagtatctatagtgaatagtagccgagaattggtatctttctagtggagtgtgtgggagacatgagcacaaagagtatcgccgagttgagcgtaaacatagcaaaatccagtgcgctcacccactgcaaaggttgagttctctgatgtacctgcttgcaacaaggggtgataaattacaaagacgtgtcaaagcttcattgattcaccaagtaagccaagtactatgtggtggttggaaaacttttaactagtcgaaaaatggacatctatcatgcaacataagggcattgaaaccgggacgccagaaaccgtattctaaagaaatcgaaaggtatcatcacaatcgttgaagcattatgcccgtccagaggctcttcctggcatcttggcgggacccaatccttgtcggatctcgtccaacattttgattccaattgcttcgttaccattcttgcctctctttgccttggcacccttgcgcttcgcttgggcgcttgtgttgccgtcccagcctgcaagaaagtcatccataacgttgttgaaatcatggcggggagccacggctgctccgttggcgtcgatcagactgggggcctgcgatgaggcggttgagaagcctgtcatgccggtcatgccggtcataccgctgaccatggacatactatcatcgtactcatctccctcgtcaagagcgtagagcgcctccacccggtcaaaccgatcatcaagcagtcggtgcccttccgtccgggccaaggcggaagaggtcatagagtatgccgaagggttcgtgagtgcacccttacgcttctttctgcggatgggggtacctcctactgtgaaaatagtagaggcaagagtgcttcgttgctccgagggaacaatgctgggcggtgctgccggcgcagccttcactttaccctccttcttgaatttagcaaactcgcgcatccatccctggtcatccgggtccatatctggagccggcgcatcgtgagcgggcagttcacccggttcagcatcctgggacttattctgggcgaattcatccctctgcggtggtttgtagtcgcttgtgctgggctgcacgggagccttctcagtggcatcagactcccatccatcatcatcttcctcgtcaaacaacgtatcctcccaatcaccctggtccatctcctccgcctgagtggttaattggccaaacacatcctcctcgtcgtctgcgtcaacatattcctcatcctcaagagcctccaatacttcccgcagacggggatccatatcaggctggaatccagcaatcgcatcaggcacgttctgctgatcctggtaggtcggttgccggacataggacgaggcagttgaacgcatatcagatccgtagacacttcccggtccgtactcgcttctcgcatcgtccagagtgacttgtcgcagagcatcttccagcttcatccccttagccttgcccttgtccttgctcttcgcttccacgaaatatgaatcaccaccaccggtgttcagttcacgcaaatgttgcatgtaatcatatttcgagtcgtcgtagaaaataccatagttcgcggcttcaccttcgtttttccggacggactcgcccccaaactcactagctaaatccgagagcttcttaccgcgggcttcgagggtaaagctacctgctgcagggcctgacaccggggccagaacacggtcatcggctgaggcgtcgtgaatcagggggtcattttgggatcggtggaagagttggtatgtagttgcattctttttatcgctatttgcaatatgttagtcactggacaatacatagatcctattgggaaagccacatacatccactgcttgcggggaggcattttggcgactgcgatgggtgtgatcagctaaaatgcagattttcagcctgagggggttgatattgtatggaccttgggagcaaaaaaatcgtcaaagtgggatgtgatagcgtcacgtgagggcttatcggaatgcccaactggtcgtcctcaggcagcgacgtgggggacgtgctgtgggtagagaggatatggcacgatgcgaatcaacggcgatagtattagcactgatgattgactctctatatcaattactcggtatagaattactggcatacttgtctttacttctcaacaggggaaaaaacgtgctgagtcagccattcttatcttatcggcggggcttgcctgattgggcgatagatcatcgccaaatggaacaaaattaataattctccgtcgctttgcctcttcgcatttcccctccattctcccctctttcttcctcctttccccttccactcccccatcggaaggttttatttcaattttggtgtactgtcagtcgagtcacttcaccacacagtcaccatggttctcgcaaagtccaaaaactccgtggggctgggcaacagcctcatgaaggatcgtttcggaaaagggaaggcgtcgaacatgaagaaagcctcgcacaaccaagccgtcgcacgaaaggatatgaacggagagacatacatcactaatgccaaggaggacgccgcctgggtgaagatgcgcagtatcacagaacaagccgctctggacgagtttttgagcaccgccgaactggcgggcaccgattttaccgccgagaagatgaacaatgttaagattattcatgccgatcagaagaacccttatctcctctccgcgtccgaggagaagtcggctgtgaagaagcaccagaagaacagaggacgactgaccgttccgagacgaccgaagtgggattcgacgacgacgcggcaacagctcgatgttatggagagggagagtttcttgagctggcgcagagggctggctgagctccaggagaatcacgatctattgatgacaccgtttgagcggaacttggaagtctggcgacagctttggcgtgtcattgaacggtcggatctggttgtgcagattgtcgatgctcgaaacccgttacatttccggtcggaggatctcgagtcctacgtgaaggagattgatcccaagaaagagaaccttctcctcgtcaacaaggcagatatgcttactgagaagcaacgagaggcctgggcagactacttcgatcgcaataacatcagcttccggttcttttccgcccagctagcgaaggaaaagattgacgcacagcttgcggaacagggcgacagtgaggatgaagaggtcgcggagaagctggctgagacgacaatcgaagagcagtcgactgaggcgccacaggaggaacatgatggaggattgaaacttcctggctcgagcagatcccggaggacagaaattctcgacgttgatgaactcgaagaactgttcctttccaacacccccgatactcttcccgaaaacgatgacccagagaacccgcgcaagcaaaagacagtcattggccttgtcggttaccccaacgtcggtaaatccagtacaatcaacgcccttctcggagccaagaaggtctcggtgtccgctacacccggtaagacgaagcacttccagaccctgtatctctcgccggagatcatgctctgtgattgtcccggtctggtgttccccaacttcgccacgactaaggccgacctggttgtcaacggtgtcctgcccatcgaccagcagcgtgaattcaccggtccagcaaccatcatcgcccagcgcatccccaaacatttccttgaaaacgtctacggagtcaccatccatacccgccccatcgaagaaggcggcacaggcatccccaccggcagcgagcttctgcgcgcctatgcccgcgcccgtggcttttccactcaaggtctgggccagcccgatgaatcccgcgccgcccgttacgtcctgaaggactacgtcaatggcaaactcctcttctgccacccgcccccagtgccagagggccagacccccattgaccctaacgagttcaacgtcgaactctacgacatagcccacctccccgcgaggcgacaagaacagctcctcaaggccatgcaagcagagcaactggccgaggacatcgactccgacatcctctctatgtccagacaacccgtgcaaggctcccgctcccgcaacctcgacaccggcttcttcggcgacgcctcgaaaggttctgccggccgtctcaccctccccttcaacgcacagtacaccgaacaaggccagcagatgcgtcaacagctgaccggccgtaaggagcgcctaatggtcgccctggaacgcggcatcgatgtgacggaagtgcggggtggtagctccaagaagcatttcaagggcaacaagaagcaggcgaagaagaagcgcgctgttactgcggacgatgattactgatccatttccgatctgactcgcgggcgagtggggttcatggttgcctgtggttaatgaatgagttcgggttacgcttttgtttggttgcatttagaaaagtttcttatgatctcggtttgctttatgtatgtaggattggtgttgatgttgatgttcatgaatcatgacagttcatattgaatgaaatcaatttcaccgtgatatacttccagatatgtaatttattcatttcgtacggagtagtgactgttcctccctatccgaatatcggctgtagacaaattgttaccttggctctaacgtatttaaatcatctcatttacaaatgactcttcagcttgagcccactagcagccaacaaccgctccgcctcggcctgctgccagttcaacttctcaataaccgcatccttgcgagcccggttctccctcttgccgagctgctgcaagtgcacctcatccgggccgtcggcaatccgcaacgtccgaatcatggcccacagattcgccaacggcgtatcctggcacacaccagcggcaccatacgcctgcacggcacggtcaatgaccgtcaacgcggtctggggaaccagaaccttggcctgggcaatctccttgagggcagacttggcatcaccctgatcgatcttgatcgcagcattcaggacaatgagtctagcggcgtcgacctcaatccgcgacttggccagccactcgaggatgacgccgtgtgaggacagactcttgccgaaggtctgcttacgctcgtcgttgatccgtgcgatgagccactcgatcgccttctcggcggctccgatcgtgcgcatcgcgtggtggatgcggccgggacccagacggccctggatgatctcgaagccacggccttcgccgaggacaatgttggagacggggacgcgcacatccttgaagctaatgtggccatggccgtggggggcgtcgtcgtagccgtacaccgaaagcatgcggtgcacggtgattccgggggtgtcggcggggacgaggatgacggattgctggcggtaggggtccttgttggtagggtcggatttgcccattaccaggtagatgctgcagcggggatcgcctgcgccggaagaccaccatttctagaggagtcttgttagtgattcgagttgtagcttggttgtataggtgagggggcacgaaccgatccattgaggacgtattggttgccttcgcggcggatgttcagctggatgttcgtcgcatcactggaggctacctcgggctctgtcatgaggaaggccgagcggatcttgccgtccagcaagggcgccagccactgctgcttctgtgcttcgttaccgtacttggcgaggacttccatgtttccagtgtcgggggcagcattattcgtagcctatagtagtaatcacttctcatcagcatctcgtctcagataattccttcgtagagaaggaggggctggggagatctatacctccgaggccaacttgctctttcccagatactcggccatcagaccgtattcgaggttgctgaatcccgcgccctgggagaagtggttcttgggcaggaacatgttccacaggccttgctggcgggccttggtcttaagggattccatgacggctgggtaggtggcccatcgctgatcgccttcgcccagctgggcctggaagaccttttcggcgggaatacattctttttcgacaaattgttcgacctatgcgggggttgcgagatcagtattgaacccggagagaggatgggtggggatggtatacctggtccagggtcttcttggcccgttcgctgacgaacggttgggcaattgggggaattcgcgtggaggcagacatgatgctgtgatggtttgctactaagtcaagctttagaggggtaggggggaattggaattatccagagagaaaagaccagtcgagagagggattataaaggaaagagaagcatcaatcatacgagcagttggtgaactgcggagaagctgtggagcggagaagatgccgaactttggcggttggacctcggctcagaaccgaatctctaatgattaatcactgggccttcggaccctggcaatcatgaacaatacccataggtatataaataggtacacggtgcctactacatctaagacacatcgtcttcttactcatcacatcacatttcatttgtcttcatccgtcaaagtcccatacgcaattaaaaaaacaatttatgaccgtaacaatgacacagtagtcccaagccatcccaagaccattaattcccagaaaccccaattgcccagaaagaaaatcaagtagaagagaaatcaagaaccagtcctgcaaacaccgagccgagcgagaaacaaccgatgatcagatccaggtatcatccaaaagatccatgcgaccggcgcatgagacgtaagcgatcctggaacgtcgattacttctgcatctcggcctcactgttggcgctatggttggcagctgattgctcaaagttcttcttgcctagtttggcaaatagtgattggggtttgccagcactgcagcggaggtcatcatgttagcaatcaatccaggtaaaacacaagcaatgaacccccaatcactcattgatcaaaggcaatgcgagagtaaacgtacttcttgaatcgcttgcccttcaagtcgctcaatttcttggagcacgggctcataatatcatccgagggcgatacatagctggcttgttgcctggtacgtctgttagtctaccactctcctccgatgaaaagatccaattcaattcactaaactcacttgtctccgctctccagcttgccctggagcacttgtcggtgatattccattgattcgatcttggcgggggcagccttaagctcgttggccttctcggtgttgaccagatgagtgttggtggagcgatcagcgagaggatgcgaaggagactccattgttattatgtgaagtagagattattctctttggtcccagtggcagatagagaggatgcaatgttgtttgaatggattcagcgagggatgaagttggagatttgcaggtggataagaagcggaagaaattggctgcaaaagcgaaaaagccgcgttgttgattgttgtcatggcaaccacccgagtttttacatcatctgcatttctacctcttcacattaatgttgtccgttcatttcttcgttccatcattaaggatcgttaagtatgttccactaatcacaagagttctttactcgttacagtcccaccttccatcggacaataaacatacacccccttcttgtcctatgatacaaccatattaattctctcctcctcggttacgagtgcccatcattccgagcgaccattacccatgccaataaacaatcatacttcaagaggcaaattcctcagaagaggatttccatgtctcccggacaactgtcagaccggcggcaggccagctgttccgccaaggaatgaattgatcacttagtgattaaaacctattcctccagagtgacgtcagtgacatgggtggccaaacaatgctcggatacacgtatggtcacatagaatatgaataatgatagccaaagcggctgatgttatatactccgcacatgttcatccttcttgtcgcatactgccgtcgctcgccaaaatcggctcgctgctctcagtcgaacctggggaatcatagtaagatgatccccgtgattcatacgataccgggctctcttcgccctggctctcctcgtcggcagggttgagtaccggtggactgctgtgcgaccggaagtgcggcggcgccaggtgcggcatgtcgacagtagccagagaaggggcgggccttttgtccgcttcgtcggggctagacgggtcggacgtaggtgttgggggagaataggcaatggtcggactgagtggttcttcctgcgagtcttccgacatatttcgccgatgacggcccgtggcccggtacgacgacgcaggtcgtgtcgaacttgggctggccgaaggagagccaaaaaatatcggcgacgacgagcgcaggctataggagcgattcatcatattctgcacacgcgggatatcaatgtacgtgcccagcggaactcgcgaaaagaggacgagagcgaaacagaagagaatcataatactctgaatcacagacactctcttctgaaacaccaactcgtcggctaggaccccaagctgggcactaatcgagtggatctcttgatggtactgaattcgctggtgctcgaattccagtgcaacacttttccatacttgatcatattgttcgcggaactgcctcagctcattcaatacggtcacgttcaaattctccaagaacgtggatgttttggccagctggcgtttctcaaccttgctaaacgcatcccgtaggatccgagactgctcttcaatatacaacagcgatagagtcgagttggactctaacatctgcagccttttattgacggacttaaagaaagactcttgggtggtaggattcgaggatggaggttgcgtcccggacggccgcaccgattccgagggtatgctggactcttccttgggggaactgactgacttaatctcggactcatgtgccgcatcctgtcgcaccgtttctgtgcctagtgtcgtagaggaggccgaatctggactcgcgccggtaggccccgttactttctggccgcccaccgaacccttatccgaggggtcaacctgagagacaggtgctgaagcttctccacttggagtggtttcttcattcgcctttgggcggctctcagacgattggctagccgcttcattctcggccccagtcggcgcggtacttatatcgcaagtatccacgggtggggggacgcccttctgtagaagtctcacaacctccataccgtgatgggaacaggatccctgcgcctctatggtagctgttggtccatttgtaggttcatcaggcaaggccacagtagttagaggttgctgtgcgacgtctttcacttcaacatcgacagggtggggactcggctccagcgcctctgcagcggcctcctcgtcaccacgattagtctcaccgtcgtgtttatattcttccagcatagtagttccatgaattctgaccaaactgagaggacagtagaactcattcccatagtgtgtcaggaactcaatttttacatatcgagcccaaatgagcgggttttcaaccgcaaaggcttggatctcgcgggtatttcgcgcttcgtagacacccaattccctccattgatcggtcttggccggataccgatcagccacgctcacacggaaggtatggaagatagaactgaagaactcgtagttggcaagaacgacagtatcaaccagaatgtcgtcgcacaattcgaggatgaggaatttgttctttgcgcggcattcattgagcatatagctgtccttgttctctaccaagaccgatgatgaccctttacattcaggattcgtcttgagcacggttgctgcacaatcaaatgacgcataattgaacctttctttgcacgtcgtgccggcgtccttcccacgcgaggcgcccttccgcagatctgcagacacagcggcctccatatctcctgcgctagccccagcagccgtaccagttatcccggccgtaggtatgcttgacccccaagatgtaggcttcgccgcgtcggacgcttcagcaccgaaaccaccaaagtcaaggtcaatctcagtatcctctcccaacgaatccaacgcattattgatccccgtcggtcttcgtcgatcctctttgccagctgcgtgcctgtttccgcggacattctctgccgactggcccaccttcgccaggttttgctttttccaatcctcgaacgagaggaagtttgaattgtcgagtggcgagtcggtgtcaagttcatggtcaggctgtccaccaggggcaggtatcgcagtcgtactcggcgctccctccgaaacggtcaccgaaacggtctggtcaggagatctggtcgtgtcctgagtgatcctgggggctgtccgctcccatcgcgattcgacacaaatgggccattggatgaactccgcttctacctcgctccagtgccttgctaggcaaagcgcttgtttattctcggctgcagcgcccgggattccagggaggatcaacgcggtcgtcaaggacgtccatgccgctgctgcccacgccgggatcaccatcgcgcacgcctgtggtttgatcgtgatgtcgatggtaggacaggtgagtcacagcgttatctggctatactaataatgagtcgaggatacattgtccgggcgatatgacggctgtggcgatttgctatcgtcaactgagcgcaagaaaaggcaaaaactcccgagcttatcggcgttagtaggtctcaggtcctttgttcggttggggagggcaagaggacaactggcaattgcacaaaggacttacaataccaagcagaatatcctgtgcaaacgaaaagtcaatatagcaatacaatatgaaaacctctcgagagagaagttagaaattttcgaaaagtgacatctgcgcatcggcggtctgtctgtagcgctcgtgaccgcctcgcgtcaccgccgatcgctgagggaatgaaattaagacccgtactagttagtaccttaatagatacgaggaacactttgtccaaatacactggaactcccattcaattacgtgctctacttttacggaagcaaaaaacacaggtccacgagaatcacttttgggtttgtatttccaccatgatgtagatcatcgtccacttcacacccattccactatccccagctaaactacagtacaaagaatccagtccagtacatcatccgcctgggtaagaccgggaaatgagcgcagaaagatcgacatcccgtctctcgtaggctttctttctcagatttgccgttgaagagcgcacgaccatcacacggatggaagtgaaagagtgcgcttcctcgtcatattgcttctgcctttgcgccgccgtcctgccaccatcacattgaaccattttgttgagaaatgtaatatttgaacagtttgagagttgatgaagaaaaggaatagcaaaagaaaacaagcgtagagccttcccaaaaacctttcggttgtcaagggatgggtcacttttgaactgcttgctgccaccagtagttatattatacaggagtaaaaagaagaaaaaaaaaaaaaaagacaaagaacatattggccgcttggatgtcacacacagagtgtctataaaagcttgagaaataaagtcatgtcgacgcagggcccggcgcaacatgacggagtggagaaatgcaaaattggtttaatgaggagtttaaaaaagaaaaagcaaagagcaaaaagcaaacaaaaaggtgaggtggtcggtagtttcttggtcgtgatgtgattagattatataggccaacacgatgcgaggagggctgagcacggacaaaagcagtgacattgttggcgcttacaggtggaggtcatgccagccaccaacgaggtcaaggtcttcatcgatgcttccatcatagccgttagccggcttgatgtacgcaggcttggactccacggcatcgcgacgccaacccttctccaggaacgggcgacgacgacgttctggtgaggcgggttccttcttagcccaggatccataatcgaaccctgatgagcccagaccccagtctttgcgccatgccatgttgttcaggaacttcttctgtttgagtgacacctctgccggcttgtaattgcgtctgcggtcacccaaagcggcccatttatccaggttcgacttcttcgatgtattctgcggagaagtcggtgctgatttagacgtggtcttctcgttgtggactggcttcccaggaatagcacgggcctcggcagcgggaactgcctcgtcctgtaactgaatattgagcatagatgtagtcacatcctgaagaacgtttgaagggccagcgagctcaggagtattgctgtcatggctccagctacgagagttctgctcgcgtcgttgctgcaaggtagtctcttcgctctccagctcctcgtcctcatcccacaagtcactccagctcttcgagatttgttcttccttcttcttaccgaacaccatggaaagagaaggaagaggcttgggcggttggctgggtagagaacctgtgatggggacaggatcggaaaggggcgggtagcggggctcgatcttcgtgaacgctgtcgagcggtatgagtcacccaaagcagactccataacagaagccatggacggagtaccctggtgaacagaaaaccaggaagtaccagccgtctcggattctgggaagagatcctcgtcgtaggtgtcgtctggaatcgcggataacttccgaatatcctggggcggggtgcactgtagagctttggcccaagggaacgagtcgccttggttgacaaaggggctctggatcgaaggggtgcgaagaggctcgcgattggcactggcaggtaccatctcacggtcatccgtgcagaagtcatcgagaccctcatcatcaatggtaaaggtgacagttcggaggatcgcatcccggatgccagagagcgagcgcttgcttgggtcgatggcaagggcaaatcgcagtatctcaaaagtatcttgagacatgttcgggaagatatcgaacaaagattggcgatcccgaacatagtcggcgaacaagatatcagattcggttggcgttgcgaaagggtttcgagcgaagaggacattgagcaagcagatgccaacggcccagatatcagccttggcaggggagtaccctgttgtagccgggtcgtattgctcaggtgccatataacgatcgcttccaacacaggcctcatagcaccaggcctcgccagtcgccaagcctaagtcgcccagtttcatgcaaccatcctgcatcaagaagatattctcaggcttgatgtcacgatgatacaaacccttggcatgcatgaactcgacagcgctcactagttgcagcatgaaatcccgtacatgctcggtttccaagggaccacggttgactctgattgcctcatagagatcgccattcgcacagtattccaagacgaggtacatgtgggtctcggtctcgaacgagtgaatgaggttgacgatgttcggatgatatccgagacgacgatggcaaaagagctcatcgaaacgatcatcaggcatcgcccccttcaccatgcacttgatagcaacatcctggccggtcttcatatcatatgcgaggaagaccatgccgaaggagccatggttcaagggagcaacggtgcggaagcgcccatccaggagctgcccctcaacgaagctgttagggaggtacgacattgtcgagtgatgatcgaaacagtagggaaacggtcgtggtccaaaaggatactcaattgcaggtctgtcgacggaaaagacctgcctggcgggacaagatttcacttgagcgggtgggcaacgaagatgagatagtacaaagcgaaccaaatatcaagaattgtaatgccggtccaacgagtcgtaaccgagaaaacccaagaggagagatcaaaaggaaaaagagaagttgagtataagataatcgaacaatggagtgtcggtttagaagatcatataaatatgagatgggacaaaaggaaataagacgaggacgagtcagcgcagagcgcaagtcaaagaaacccaaaggaaattgacaacgctaggaaattggtagagaccgttatgggttcatcggtatatcgtttcagtgatgcgggcgaaagccgaaagtcaactaagtatggcgataaagagagagtgctgaagagaaagacgacgtccggcggatggacgagaaaacgaatcaaatgagatggaagatggaagtaaagacgaagagcaagagcaaatcaaaaacgctgcgtgatatcgtaaatgccagatgtataaacagttgtcgttattaaagaccttcgaacaccaggctgaaggacaagggcggtcgtgactcaggggaggggtcggagtgaggtatgacgctatagactcataggttgactgaacgacgaaatagtcctggattggcaggagattgatatatagaagcgctgaagctcaggacaactggtaccaggcgtcttcagatttcccttggttgggcaaattgaagaaccgaataccagcaaccggctcaggttgcgaacggtggagtctaggacaactaagtcgtcggtcttagtcttgcaagtcgacgccctcacacgtagtctcaatgtgtgtaagatgaaacgtagcagtacttcggtcggcagatggatgagagtcgtgggtccgaagtgaccttacacgttggcttgaggatgagtcacccgaggtgttcgaaagggcaggcacaggacagtggcactacaatatcaggtcggattggactgaggagagaaacttgggcagtagatcggattaggagctgacgctggtatagtctaagctttaaacctaatattctcttgctgcagcgatgaggcgattagggacgtccgaggacacttgtagattggcgataacgggtggcgacggaagctgtgttggggacgatggagaacggagaaggagcaatgtgcagaggagagacgggaggagaggaaagataggtgataggagagagggggagaaagagaaggaaagaggaagatggtgatgggtaggtataggtggacggtggttgagagagtcgagtcagagcggatcaagttggcagcaggagcgatagggatgatggataaggaggtccggatgataacagaggggggcgaaacagtcagtcaaatgggactgggaccggcagtcggaaccttttacttctcagtaggagggtggagggcaggccaatccactccctgccagaaactgggcgaacgagcgagaacctgacggagcgctttttgctgactgggtagtcggaccaacacggtggagtccgatcagccaatgattacgattcgttaccgtaccaataccgcgtccgaatgttccccaaaggtgccccaacaataaggtgctgtgctgtatactactcgtactagtcatactgccaagttttccccaaatgctgcccagcagtaaaaaaggcccttcagtacctcgtggtaacgatacgtgcgatctccgtcggcccaccaaccttcgatggatgcaggtcgagcagaagacgcggctagactgtttccggtgcataggctccacacccccctgaatgaatcatacctctcatggcagaacggatatcactgcatccccccaagattaatcttcaccatcatcatcatcactttcgtcgtcatggattatcttcctctttttttgttgtgtcccttcttccccctccattgtaagttgggggggaaggtatggtatgtatggctcagacatattttacatccactggatagccaatttttcagttcaattattcgatcgcgtcagaaatgacgaagaattcaaaatcgaatgtggttattagtaatattcttaattcttgatgatggaagaggccattcttggctgcctttgttacgaggcattcattcccgctcccattgttgtccgtacaatcaatccacccgctgtcatgatggctggcatttagaattgcatcagatgaagctccagccgacattcctacgaactactcaattgcccgagtgatcgttcgcgaatatgttatctagcccaatatgagcattgatagcatcttgacctacagaccatgcgactttttatgcgctagtcaaagtttatgggtccttaattgggaaaaataaagacttagcacgggacatagcgtggcataagtgccagcctgtccaaagttaatacgacatgtgtgctatagctgatacctaattgcatcaataaggcagatggggagcaattcgggagataatattagagagtagtatcgccgtttacaggctgccgccccgggcatccaagcagcagcatgggacgtggtccgtcctgtgccgactaaggtcaagttcctgcaggtccagaccagggtcctccacctcccccccgtctccatccttatgcagtggtcagttcctgataccattcatagcaattactacccaccgagaccaaggacaaaaaatagaaggaccttgggtaatgagaaatccacggtcctatcggattgaggttcctttccttctccgttctcggccgcgaaagggattggaagtacgtaacgggagatactccacatgagtgatgatgaatgatacatcatcatcatttgcttccattttcgattttgcctcgccccgaaggcggagcaacggtggcggtaacgctactccattttcggaccctcacactgccgctaatgccgatcggggccaatgacgaatggccgagttggcactattcccaggctgcatgacgccaacacaacaaaggtggactggtggccaataatggcagcattcactccctcgacaattaaaaatgaagaaacaaaatcccggggcagcttcaatgatgatcattgtggatagcgtgtatggggaagatgaaatggttgcagattaattttttggtgtggtagtgcagatgatgatgaataatttgtactacggatgtacctgtgctttcctttcgagtttatttgatttaatgtcttttcttttcaatgaatgcagaactttgtttgctctttggggtctaatttttcagatcactttctctgtccgaagtttagagggtttgacatgctcatggttcgtccgatcttggtcccagggaaaccggatgaatgaaccacacactttctctgttttggagtcgcgacccaaacgttgaattcccatttctcctccacgcggaataccttctccagtgagtagtgaacgacttgggcaactggcacggctctggacccagttttgcggggggttgattgtgtgtccttcacgtttcaggattgaatatctatcaggacaggaggcggggaagggggggggaagagatggggagatgaacgtatgatgtagtacagctcgaatgacacgaatgccccggcctcgagggagattgacgtttcgaccagcgaccccgtggctggcatggcatgcttacttgctccatacaaagtgactaaggaacatgccagcctgccaaaaaatgttagatctgtttggcggtgagggagaagaaaacgctgcagccgcttgaccgcctcgtcgagtgtgcctgtaaggtttgtccttgcagtaggtggttgcgtgtctcaactgcctgtatgcacttcataaaagaccacaactaagaattggtcaagggtcgggttggcatcgtccacgggtcctcaagcatagtggttctccgtccggacgaactcgattggcctcaggtcacacaccctggtaaggatcacgcgatcgatcttcgaaaagtccccaacccttccgaggaccggttgttgttggtcaaccacacgaagtaccagtacgatcccatcaacaacactacttactactactacgactcgggctcgtgactcgtcggttggaaagatttattacaagtgttctttgatcttcgattgagttgagttctggattgacccccggggatatcttccgttctttccatccgcctcggttgtcccccggctgaggaatcgttctacaatgagctcactgtgtaatctggccacctcatcatcataaattggtggcaggtgtggatgattaccctttcttgggtcgatggttggaacccccctgattggcgtgaatgagctgaatagatttaggcataattctcgtagaccagtgtaacgacgattcccatggtgatagcagtattgggcccaacaacaatgttgcgataggaaacctaatcggttgttatcagctccaacgctaataactggagatggactgctcttcaagttttggaatggaggagggggctgttatcgccgggtatgacggtagataatcgtgataagcgtgtttcccagtcgatgatatcagagacggggtctggataacgttccctatctcatttgattaatcccagcaatcatctaatcttcaaggggggcagtgatagagaacccaccaaccaagtgaaataaccagccattgccaggctggcaacatcaacaaagtacatacatccgatatacattcagggatcaaccaactgatggtggtccatccgcgacactcgttgcctctttgaatcgaagaagtatcactactttatttaccccgcacgatcttcccggaggcttggttgtgttcacaattcctccgacagacaaaagtcgcgtctgggaaatctcctgcttgcgagacttcaatagctccagcaggcgggctctgggtaagattaccgagtttaccgataccgtacgtggctgagatccacttcgggttccccagatttcctgggggggcacatgaccaacttccatgaggaagtcaatttgtggtctgattatttggtctgtgatccctcaatcgcatggtctttgtcttttcctatacgtggggtggcactagtagtcctactagtaacgaagggacccccggtactggtaacagggagtgttcgccatcttgggaccccccgtacagtgtacgctttagtggataaggagaaccttcgataaccccctacaaatccctaatcggaaatctgttccaccctggcaactcttttgggatttgagacacttcatcagcaactgcaagtattacgaatctatgttacccctcatcaggaaagaaaaaagcagacgttcatgcagcaaaaaccaaataaaccgcccacttgactgtggcgcttacaacagatccccactgaagatatgcgtctagacggcaacatcggtacagatcatctaccgcgcatatcatatgtaagtggtcttttgcccccttgcctgccacctctgcatatatcctgtattgtgtgcaacggggcttgagggggaagatcgtagaattattcaaagagaggttcgccacccccggctatcaataatagtctactagtactagtttaggttatatatttctcggggtaattgagtttctagacgtatctctctctctatcgccgaagcaaatacctcaaccatggtcacgagaccacttgtcctctcctcatcgtccagagagacaattagatcaccattatgaaacacgctcaaagcccagacaagggatgaggggttccgtcgcggttgactcgactccaattgcaccgatcttgaatcacagcgatacgcccaaccaccccctgcatggaatcgctcgattccatcatggatgagacctccaataccccactaccctgcgcctacctaccgtctgccttcaaccgttttgcatcctgctctccttaacctttgcttcccttcccatgtcttggaatttctagtgggctgtgcattagcgcctggtacacctgtatgcacactgtacatcccgccagaatgtaatgcacataccaaggaatatcccccgaattgcctgatttcagcgacatgcagaccaagagccaaagcaactcgaccctttgccgctgggttgtgctttccactggatatggtgtttgcttttgtgttgctgacgctgcataacgggtggggaacttgatcccccgctagaacgttttagcgcatccctttgagaaatcctgatagacggtatcgtcaagcgccctgttgtttgggatttggaactttttcttatcgccgtcttttctatttttaatcgggttggatgttggggattgtaggatgtagaagacagtactggacgtatgcatcgtcagcagatatccactccattgataccaatgttgtcggtagaactagtctggtactacgggtaaaatatatccaacatgtactttttcatcggtcggttggttatagtatcacgccagttgaaagatatcagttctgatgcgctgctacgtgtttttttggagaaggatttgtcatgggaagtgattggtcttattttggatgtggttttcatagcaattgtccggagtctgcgtctgcggttcgcatccacctgtaggttgtagggctttactagtacttgagcgaaatgtgaaagatttcgagtcagatatattgtgtgtcacgcaagtttgactaacaatcatagtgatgtcaagtagcctagggactatccatggtatccttggagacatattttatattccagggtttacttatctacacggccaatgggcgtttgatacacagcgaaagtggttttactctcacataagtatatctgaagagagtatatggtaccattgactaccgttacaagggacggaaagaaataaagcagaaagccacaagcgtagagtagactcttacaatcaaaataccaagcatatcatgttttccatcagtcgagatcgaaatccttgggtcctggggcatacctcagctttgtaactaccaacgacgcattcgttgctgcgaaacggtcaatatgtgagttggttagtcatgcctcgatctgttgctgctgatgtaaagcgctaacattgttttatcagaccttactcccaatcgtctttatcgtattgaactgagaaaagatcatggatctcgtgcgttctagggaaactagctaggaaggaacatagcctatacaaagtacatgaacgagataacggagaaatgactggagcaagcagaagaaaagggatctgctggatttccgtatgcggtcatccccatccagcttagggctgagattgagtatattgttcaatatgtaatacccagtggatatgatcgaaatacattgtcgtcttgaaagaagatcgcattgcaccctgttaacatacttcatgcagctgcgtcaccaaaaatgaataattattaggcagcgtagatgatgttgataggtcgtggtgttcacaatgatgcaaactacgtgctggactctgtaccacggataatttcaaccaagaaactatttatacgaaagaagacttttcaatactatgtttatttccattatctacgactcctttttcgtcacctcctccaccaagtactcattcaccggcgtcctcaccccaacctccctccccctcctcacccaatacccgttgatgaacctcacctccgtctcgcgtccagccctcaaatcccacaccatcgaacacgtcgtctcagcagtcttaatcaggattgcattcaccgtcgcttccaacctatccacagcaaaccgctcctttacacccgccacacccctcaattccggtaacgcaagcacgacattcgagatctccgtgagaatctccctccgcgtatcggggatggtgaagagaaaaccattcttcgcatcattcaaagcacaaagagggttgcagaaggcattgacggctagtttttcaagctgaatctgcaggacttccgtgtaggggtaggatgttgcgtttagccggggcgacagggggagatgatctagtaagtatgaacatgaagattcctgggaatgaggtgcttcttgtgagcggggaactagtccgaaggacattgctgcgaagccagtgtgcgtgacgttgagtggtcgattgagcgttacgccgtgcgagatgactcctattatgtagttgggtcgtgtctgggggttggggaataatgtttcgttgacttcatcgatcatgccgctgccgttttggaggaataagatggtggatctggcgtctagacggtgcttgaggggttttagtgctgcaacggtttgtgttgctttgacgctgatgatgaggtgggagatgttgctggttagggcttctgaggatggtgatgaaggcacaggataccatcccctttcccggtatacctccaggtcgtagccgctgtgccctatttgggatccttctcgtgttgtaagtaggatttggtttccgttctcctgatatccgcctagtagcgattcgcgatggagaaggagagtgacggagggcttgctggggatttcggacagaccatgggcggtgaaggtgccgatacttccaagtccgagaacatggatccttggtgatgactctgagtgaggcatagtaaagggtcgtgccggtaaacagttgatctttgaaactggtcgggataaaggcgatgtcaagagcccgtgcttgacacggaacaatcgcactgggagtggaatgacaacgaacttgattttttagacattccgatcagcaggctagctagaatatacttcatgtggataagttatatatacaataattgaagcccatagggcgtgatagggtgtaaaggactgtctttcagcacttcgattcgggtcggtttcccggtggagaatctgcccgccgcgccctacgccctacgccgctcgggataacaacttcggcattgatttctgcacgtaggagcgattttacgtcggactcgaagcgatctgctaattctcagcagtcccaagggagaggcgaagtggcgcttctgccaagtacgtctgagttggtgtagattttcaactgccgtcttacaccttacgccttgtccttgacgcccttttcaacatctgctgtgtcttcctagtttcggttaacgcacgaaatacgttctatcagcagagaatgaagagttttcatcactcaatagcaactgaagcgatcgagacagagatcaagtatgttgttggctgtgccttctttgaccctctcgaaggcgtcaccagtattaagcgcagttgttcccattaaaataggttgttatccacaagcacttcttaatgctttctgtgtgataggtccgtgagcactacaagccgtaatcgcctttgtccaccgagaatgtctctcgatgggttcctacctccctcagttcaccgattaactgatggtcagccttttcgcacctctagcctcaacaaactcgacgcttctggactccaagccacctgaaccgataaacccaagtcagtcccttcagaccatgtcacataattagccaataaaatattcaccgatatcatggcccgcgcgatggcctgcagcatcaggatgggaggtggcagagattgtaccccatggatctcttgtgctgtagtcgtccgtgagtgtcttgcattacgctataactgctcggtttcacaaggcaatccgtgcttgactaaactcacgagacgctctaccatttctcccaagtggatgggcacctagccgatggagaccttgaaagcaaatgggtactgactctcgaatggatcaaattttaacatgccctgtgcttcagcagtgggtgactaatgtcacgtacggcaatgagtcgagtatatggctagacgtgatagacgaaggacgtgtctgtagtgatccgctctatatagggtgtgggtgtggcggatacaacggaagggaaagatgggggggaagggaaagatgggggagaaggacaacagcagatgaatacagagtatggtatgaacttaacataacaaagtatatctatcaaaggtggtcagattgattcatccccataccagtctgaggggtatcttccaaatggcgatctacacctccacgttcggtctcgatattgtttctgtccgcacagtgtagatgacgaaatgcggagagccattccgggttatcagcgatagtttgattccacgagtcctcggagtcgtaaaggactcgtcttgcttcttgttgaaacatatcgtccgtaggcatgacaccctgttttattttctcttgagcatagcgacttaaatgcagtgtaagaacctgtgtaaaggagctgagctccgacatggaaatgttttgcttagcgacagcctctgcttgggcatcttcggctactttgtccgggttcgctttctgctcttcaatgagataatgggcgcgcgacgagatctgtgcaaaatgatcctggacgtgtgtgttggtcgcagaaaatggaatctgactctgagactcctcggctatcaaataagggggtaaagagttcgtaacctgcgcagcaatggagggtggaaatccgtgatcgcctttccaatctttcattgtagcatttttccggaaatgttcagccaagtggtcaactcgttgttcccaagtgtccatactgtgctcacagaacccgcaacgtgacgggacagcagaatgtgaaatcttccaatcgtcgatgagaggcaaagtgtcgacattatgcacgaggcgcagatgctgcactagatgatctttgcgacgaaaggagcggcgcttgtcagagtcaccatggcatccattatggttatgttgatcgaggtgtgctacactaggatccagtgcgttacaaaacgcacagtgttttcttcctgtcactcttgaaaagacggtggtcccatggggagcgcagtaccacgcctccaaattcagatggagagatttctcatgccgagcccagtcatatctgctcctgaacctatcacaacagaaagtacagcaaaatcgccgaggcttatcgggttttcctcgtgcccgcacggtatttttgctggctcgacctttagagatacggcttgaaggatcatctgaaggggagtgcgatagggcggagccgaaagacgcatttgatgaaccactcgattcgccgcttgttgcggacggagctcgcctataatggcggaacgcattgtgccctgtgttgcgtgtatccgggcggctgctcctctgagtcgaccgctgggttggagtttttctcaacgcatccaaaatggctgatatagacgccggctcatcctctggtggagattcacgccatctctccatgggatccattgcattcgtatttggaataaaaatcgggccgctctgttcatgctgctgtcggatcaaatagcgactcctgcgccgggggagaccagtacgatcgctggagggtgtattggtctgttcagatacgccttggctgaaacctggcttagtaggctcaggttcctgagcactaacgtctggttcagtcgccgaagtgccgtcagccatggtgttcgaaacctccggaagaaggctgtctagttggtggaggtctgagccagtaggcaaccacgcacttctgtcaataaagacatcctcaggcgacactagttgattttctctgcctagaccataatctagaaagttgggctgtggtgctgaatgttgaccaagttgctgatcggtctccaatgagttgacagggcacagctcagatgacggtggtatataagggaaagagaagtcaaacaagctgggatctaaggccaaattgactatagaacacagtgagttaacggctctttttttctgcaggcagacttggactgaccgtcatctcctgtgtcactcgccgtgagcgagttgatatcctcccgctggccagggagatccccatgcgacattatagtccagatctagcagttctttcgataagacaaactactgcctacttactttaacttcatgcatcagttggggcaatgttgctcttgagtggcgtccataaaatgcagatattccgagcagttccttcattcaccgcctttctgtcacagaatcaccatgtaaatcatggtatagagttaacaggtcttgataccaacatttcttcaactagattgtgatttcagatagtgtatctgtatagaattattgaggacctcacatcgtaccatcaatcatcgatccgtcatgatcgcacacgacgttcgcgaaagagccagatgttatgtatacattagtagttgtgtcggtggccgacttagggcttgagaatggcgcctagaggctagaactggctggcgaaggctacaactacatgcgtcaagctttaccctaaacaatgataaatgcaagctatgtatgctcctgatccattatattcgaggcccccaccccttcctttttatttttattttaatttttttttttcgctcctatatgtttttaaagcccacctagagacctgaggaaatcgaccattttctaattatatgaaccacgagcttctagcaagatttccactgggtagaaaagttcttggatagtagtgtcatagggatattcgtcatgataaaagggcagactagccctggggtcaggagagactctagattagaaacatagtatgagttttggctgtatatcaaaactcaacactcttgatatgcagccctcacaagcacataagatatctccaagtctcgatgtcattgattttgacaattaaaggtaacttaagacacggttatcaagtatcaggtatggagataaaccgcaggtcattggaaggtcgacgcgaagaattcttgtcccaggtttgctgatgcttagcacaataagcaacaaatcacgtatctgcttcctttccctgatcgatgatggtgtgggtttagtgtgaacgaaaatccagcactaaggtccacatagtgtcatttcagcgggattcccaggtcaacgccagagcacccagattccatggcgataagcgatctatcgcttggacctgcctagactcagaataccaaagaggcaatttcatatggtatctattttgattggccttctccttgccactcctcacacccccacgccataatactatgctcgaacctggggtaggacatcatgctcgatgtgctccactcattgttgttatcagactgtggatactagataatgaatggtagataacccagtgtttcagtaatatcttgatgaagcttgtaccaactagcctaagtataaaggtccaacgctctcaatggtaacgcagtcctcaagtaacagcactcaatgcctccgcttcgtggtttttcaccatgctgttctcccaggaccgagacctcgacgtgcccggcaccgagctactagttgacacccagcatgatttggatgtcgcccacgatggctcggatatcatcttgttgccccatcccacagcctgcgaaggtgacccgctgaactggtcaagatggaagaaatactggcatctgcttcttatctcgatctatgcttgcgttttctcatttggtgagaataacaccggtgacgcttacacaaccatcgtagaaatgactggatcaacgatgacgatcatgaacggtggtggtgccctcaactatctattactagggctggtaaatatcttctgggtccccaccgccatgaagattggtcggcggttctgctttctcgcgacattgttgctctgcattggctcatcactctggatgggtgcctttcataccgcaggggagtggttcggtagcaacattctcaacggacttgggacctcggcctatgaagcagtcattcagcttgttgtctttgatttgttcttcgaccaccaacgcggcagtatgcttggagtttacatttttgctcagcagctaggttcgattatcggactggtggctggtggttatatctctgacggaccgggctggcgctgggcgcaatgggttgtgtccattgctgagggcgttttaatcgtcgcctttttcttcactttcgaggaaacgctgtttccccggtttctcttcacctcctcccagactctttctacgaacaaggccacaacactagctcagtcagatgctgccttagaggacgagatagcgaccatgaaggacaaaggaccagtcattgcggatactgtgagtgttgaagaaggtacagctatgaatacaccagcaccttctcaattccctaagcggacgtttcgggagaaactcaggctgtgggtttactatccgcaagatcacacatcatattggacgtacttcaaacgaccgttcttcttgttaaaattccctaacatcgtcatcgtatgtacctgattcgtttatgcgacctgacgcagttggcttggacacggttgctaataatacattccaggccggcgttatctttgcatttggctgtacctcgggtatcgtcaccaacaacaccatctcggagaccctatcagctcctccatacaatttcactgatggtcagacgggtcttgtgtacatctccgccctagtcggtagtgtgatcggctatttcaccagtgtttttggtgacaagattgtaatatacctcgcccgacgaaacgatggtatcaaagagcccgagatgcgtctgtgggcactggttccttgcttcttctatgccggactggggtatgagatatatggctggggagctgagacaggctcacactggattacaatcgcagtgggtattggaagtatgattgcgcagcaagtggccgcaacctctactgtaagttctcgcgtgacttcatggccctgttatagctagtaaccgtgatgataggcaacggcgtacgcaatggagtgcttccccggtgtgggtggagaaattgttgttattcttgctatttccagttcctttatcaactttaccatctcggagacgacgcagccgtttctgaatgctgtgggaatggggtatttgttcttgttctacggtatctgcgtggtgctgtcgttggtggcgggcatggcagtgtatatctggggaaagaagtggaggagacgatgtgcaccgcggtattatcagttcctggcagaaagagggggaaatatctgaacattccatgatacttgagagtttggtcatgtagtattatcttctaactataagatagcgttagggttatatcgacatataacaatgagactcgactctgtttagcgtgttttccatcttgcaacatgatcttcagagcctgcttctgcttgcctacattcagacgcaccggtatgaggccgctggcattggcggtggttatataccgtaaggcgtactttctgggatgacgagttactatctaaaaatggaaggatactttttgaacaggagataggctggagatatggccggttaagtcggcaatacttagtgggctagcctgcagggggaataggcagtagtagatgaaatgatgctagggagtctttgtctattagttatggttcgagcggtttggtctgccgatctttgtattagattactccagaccaggatagcaccaataggtactccgtggtggcctggatagaacatggtgtgctgcaggggtgtactgagcgtgcactcaagggtactgcctttcggggtctccaagggcacccactttctgtctcacagcattctgctaagttcacaattccttttgttgcagtcctacgtccccctatactatttactgcaaaattgtcctggtaagaataggtttattgacagcagccgctgagactggcaataccagttgcctagagagtatggcggaaaatgacgaaaaagcgatccaaacgacagatcgtgatattcagccaaatttaaccgaagattcattagaggatgacaatgaaccaatgaatttccggccgtggcagcagctgcctgtgttttttgcgatgggacttgggatctttatcttagggcttgcaagtattagcgtcgccgtctgcagcatatcagctgacccgcagggctacaggacaataccatcgtgggtacagcaactcccaccttgaccaatgaattccattcattgaccgatattggatggtatggctcagcatgtaggttatatagactaatttggtattctataccgtcggctcctgatcatcagctgacgagaactatagacagacttacaacatgttcaacgcagtttctttttgggaagctatacgagcaatttcgcgtgaaatgggttcttgttatggcggtggctatccttgaaatcgggtccattgtgtctgcctcagcgtcgagttcagctgcattcattgtcggaagggccatcgctggctgtggctcctctgggattcttaatggggttctaatgtcagttctacccccttgatctagctaaccatgacttggatactgattacttgtgtgccagcgcaatttcccatacagtcccgcttcgctggaggccaatctgtaatagcactgtcggaggcctcgagtgtattgcaatgatcgtcgcgccagtgatcgggggtgcgcttacaacctacgtcatatggagatggtggtgagtaatgcaaatctcgtccgggatgatcagcttctgacacctcttacaatgtgatagtttctggctcaatctccctgtgggtggattcacgatgattgtgattatctttctcttcaagaacccagagagtcagaaagttaccgatgagccattcttcaccaagatcaagcagctcaacattatgagtcttcttatatttactggaagcgttgtttgtctcctgctggcactccaatggggtggcactacatacagttggagcagcggtagagtcattgctcccctggtagtggccgcagtgtcgtttgcaggcttcattgctttcgaggtgctgcagaaagatgccgctacaattcctagatctgtgatactcaacagaaccaccggactatgcttagtatacgccttctgttcatcagcggcctttaacgtgatcgattactttgtaagtcgcttggctttatgccattcacaatgttgagcgaaccatggctaacacatgccttcaagctgcccatctggtttcaagcgatcaagggtgccacagcagccaagtccgggcaaatgcttcttccttccattattggcctttccgttgccgcaatcagctcaggtttcatcgtctctgccataggatattacacacctctcatgttgcttgggtccacaatgatggctattgggttcgggttcctaacaagcttcaccccaagaaccacagattctgcctggatcgggtggcaggtcatgtttagtatcggcatcggactggcgttcccccaaccctggtcggcgactcagaccgcgcttgacgcgaaggatattcccgttggtatggcggcggttggcttctccattagcattggcgccgcaatatccatttccgtgtcgcaaaatattttcaccaacctccttcgagagggtttgtccagtgttcccggtctagatgttggcaacgtcatagagcagggagcgacggggtttctgaataatgtacctgcatcagagaaggaacgggtaattgatatctacaactctgctgtcacaaggactttctgggccggtgtcgctgcggcatgtgtggggttggtggctgcactatgcatgaagtggaattctgtgaaaggagctaaaaaggaacgcactgtggaggagtaactaagatatttttacgctttaccactagattagttaacgtgggaggaatagaatgcgatgtaggcggtgccgaagaatccattttcggcctggcaaactacaggctttcttgattgggtgctaggggtttactccctaatttcgtcaagaatctttcctagcggaagacagtcgactttaacatctccgccatgccttcatccaggatcctagggagtagtagcggcatcgtattgctgatcgtatttcggactggccccgtggacatcggttgagccatagccggtagaatacaattttcaataaggctgagtaggaaggcagctacggcggcatcaggagaatagccgaccaagacgggattgaagctgcgggtcacggaattaggagcctgtctgcatgttcataatcaccgttcggacagccgtagaatacccttaccggcaatgccctgctattgacattccgttgcggcttaagtctcataacgcggggtccgcctgcaggtctactcctctggtttcggatgtatcacagccattggatcatgccgagtactatggtatacaaaatagctagggaaggggcttgaaggacgtataaagagaaacagcgtctcagttgctatactaagatagagaagtccacagctccaactcatcctcctcgcccgtccttgtctatcgattcctagaatcatgacccagtggattgcccttctcctggtcgctatttgcgggtacttagctctacgcctacgttcgtcatcattgtccaaaataccagcggcgcattggtcggctcgattcagccccatatggattctctggaaaagatacacgggaaaagagctccacacattggttgacgcacaccaaaaacacgggtctatagtgctagttggtccccaggatctgagtgtgagctgctaccaggatggtattcgtagggtttacgactcaggctatccaaaaccagcccctttttattccatgttcaactactacaggtactacgcacaggccattaattcccaatctttcttcacactctatcgctaacgctcaggtctgggctgaaggcaacaaaacgcattcacgagcctagatagaagcgagcacggcctccgacgcagaaggactgctgccctctactccaagtccgcactcatgcagtcgcagcaccttcgagatatcactagaagtattacttacgatcgactcctgccaaaactaaattcagtggcccagggaaatggtaggatcgatgggttggatcttagctactgtatatgtgtggattatctcagctcctttatattcggctattccaacggaacgaactacctctcccaaccgaaatcggcaatagacgtctggcggtttcactatgaaaacttgatgtgccaggaatccttcttcgttcaagagacgcctagcttgtacaagctcctgagatatatttcgattgacttgctgcctaggaaatatacagagtcagcagattttcttgggcggtggatgtcggacatggcttcaaaggcagatagggcaactgaccgaaaacgaagcacaggtctgcccttggctttagaagatgagccggttgtctatgatatggccaaagaggcagtgagaaaggactcacctcacctcagcgagggagaccagcggaagcaagtagcaagtgagatgtttgatcatatctgtaaatttaccctaattacgaatgactagccttggtttcagcccggattatgctaatggtaccaaagctgcagcgcgggaagttttgggtacggctttctatatgccataacactgcagaacctcgcttgctgacaatcactgaatgagataggtctggttcttggctacgctttctggtaccttgcacagcatccagacgcacagcaacgtattcagacagagcttaatagccagggaattgacatgaggagccgtgaaactgtgactaactcgagcaaaaggccaagggctgtagagttggattctctgccatatctgcgtgctgttatcgatgaatgcttgcgaatgcgccccaccagtacacctttgccccggatcacaccatcgaacaggaaggtatcagtggcgggcattgacggcatcccaccagggacgcgcatcaataccttccaatggtttgtacaccgtgaccctcagaaatgggataatgcccatgattggaatccggaccgttggctgacacgtggaaacaccgataataaaaacgagagagaggatgtgctatgggcctttgcaagcgggccgaggatgtgtctgggtaacaactggacctactacggtacgtatattgaagcaatgaccctatgccttgccttttcctatttgtataaccagattgattaacaacgctgaattcaacagccatgcagcatatccttgccactatctgttcgagctttaatttcacagcactgcctcgcgaggaaaaccaatgctggccagggtccccggaagatgaattaccaatcagagtgtgcttgagaaattgagatgaatgtgttctcggatccctttatcttgtcaccgtatatgtagccaagttcgaacaccacgtaagtcattcctctacatactataccacctcgtcagagtacagaactcgatcatcatgttgaccccggcgtcggggtatagaaacaccttaagccgcaacggcaagccccgatcctgtgagccctgtcgcaaactgaaggcgagatgtgaccacaagatccctgtctgtggaagatgccgatcgagatgcattgctcacaagtgttcctaccatccagcgccgttgactcagtccaaggtgagcggcgctgatgttattacattatagtcagtagtccatcctctcattgcttaacgacgccccgataaacagtgatgctaacgggatggcagtatcaacaacctcacgcatccgccgaatcaagatcacggcaccgaggctagtgttcatggaatcccctcaacatcacaaacggtacttctaagcgacaccgccgtagagaccacgatgattcccgagtttcccaatattgtcgatatctggctccacgatatccccatacgtttgccgcgcattaacgctatcagcaagttggtccgacgctggttgcaagttagtcctagctgcccagtgcccagattcatgctcaaagaggtgctggtctctgttgaatccgctgccaatcgaataagtcagggccacggggagactaacaggctggctgaagacgttaagactgcaacgtcgcaacaattggtggttccccttgacacgcgacccgaggaattctcgaagatcctcactcggccgtccctgagagccgaagccattggtctcgtgctgagcatggctggcaatgcagcaatctgcctgcttgaatcggatatagtattttctgtctcagacatgcatgtgttagatcgcaaggcatttgccaaggatatgttgtttagccagcgacgcagccattaccattgctgataagtactgtggtcttcatgacgttatgttgtggctaagatacgaaaatttccttcttacgttgaattgctgtggatatgcaagtaagtacagtaacgaggagggcgatgagaatgccacttgggctaatagctaggtcgcactgcaggccatcgtacctggacccgatctgggcaacttttcagtgacatgttcgccatagacgctcatcgcgatttcaaagaaccctcagatacgccctggttcctcagggagatacagacacgattgtttgcctgtatgtaccaggatgacaaagtcatttctaatatccttggcaaactacctcgtgtacccagacactattgcaatcgcaagctgcctctggatataagtgacgagagcctgttaactcccggactcacaccggaaggttatagccgccaggaatcttctccatccgactggtttcgcgctcgctacatatttgccacactgagggaggaaattctcagcatccgactagggcctatgaatgcatgcaatgaagcattgatcaggtgagaaaaattaggcagcactgtgattttgttggaagttggcgtgttttgatacttgtctagacgaatatccacgcggatccaaaaagcctgggaaggactcccctctcgcctatgttatgatcccaactgtaccaacttctcgatgccttaccattacctcgctcggcttctgctctaccttgaatatctcgatctaaatttatgcacgcaacaggtgctttttgatatcctgggaaaggacgatgacacagaactcctgaaggctgcaatgatgttgatggccacaacggccaactccatgcgccgcttttccagaaagttcggggcttccaaagacactgccacgattgtaagaagctagagccttcctggagttttattcagcaaagtattgacttcaagacagctatggaattacagtctgccaagcgcaattgtgctggccaatgcacttcggaagtgtgctgagctcggcaaggacatgtccactccattatcatgggccgacttgtatcgtcagctcaacgttttagctgctgacctggaaacgagttcagatcctactgatagcaactattccttgtataatgaacgaagacattcattttccaagcagcttgatcacgcgctaaatgctcggcttgagagaccgcctctgaagacacgaccgggagcatcgatctcctccaacctgccaatggatcatatggacatattcacggatataggaggcgatgaatttaccgatacacttatcgatattggtccaatggacgtagtatttgatgattgggatttacttccccatcgccccttcaatgaccctgaaggatgtcgattgggcaaacctctaggtggaatagtggatgcaagacaggaagaacttaagcccacactgtattcaagcctgaaacggatggtgcatatagatatacacataaatatctatatattgaaggtccgagagttatttttaaattggggtaaatgcttgaataactctaaactaagagatagcttgagcttgaatggtcaaagcagcaaacaagtccagtttcctgctataagcttactgaagatgaatctctttttataagattcgggtcaaaataacgataagcatcgatatcatcacatgacccggcggtgattggcccgtcggagtccggcgcctccactccggcagaaatccaatgaatcagtcaatcatgggaaaagatcgcgatatcagattcatctctggcgtcgcaattatgaactggcatccaggtttcctgcggtaatctcggccgaggctattcctcctgcccaatcatgcacaatgagcaagcgctcataccaagagtcattctctcccggtggctcgcagccgccggagcatatcgataacagtcataatggtttattacctatcaatgacctcctctcgcccacgcaagatcagccacagtcggcaggctcgagcaaaaagcctcggaatttcattgccacagtagtaggtctttgttgatgtctccagctgtgaatttacgctccccgctctaacccgtataataggcatgcgaaacatgcaggctcaaaaagacccgatgcgacgaatcccgaccaaaatgtggtctgtgcaagtccctcggtctagagtgcgtttacaacgaacgcaaatcgtccaagtacgtaacttctatagcgtattagttaccaattgctttttactaacgtgccgcaggcgagaccattcgctcagtttgatcatgagcactctccatcgaatggagaccaaactagaaaatcttccggtatctatctgtaatgatttacagtcccgtcagaggcctattcctcgaacggttgatagcccgtcagatacgagcaccccgggccgcagcagtcagggtatcaacatccgaacgtctgttacgaatcccctggcacagggccttactcctgacgctatagaacacgacgactttgagtttgatgagaatcaaaaagtcacaaactcgaacggactagtctcaatctcattcagtcagcatggggtgattctctggccaggggcccgggatattcttcccaagagactactcgaagcccatgaaagactagggaagaactacgttatcgacatagaagccaaaagacctcagctcccaatgtacatttgtccatatcctccacaggctggtgatgactggctagaggcactcccgctggcaatgatcaaaggtctttccgacgcatttttcgctacctttaatcctttcacaccaattatggataagaacttctatttttccttcacaatctgggcagcaattgagagcggattcggctacacaatggaaagctgtctagttctaaatattttagcattgggctgtcatgctgttcaagcccatcaagaagggaattacccgctacctggtactcggagcaatcgttttgaaccgccagattggatggcggtgatccatgaggagccgctgggtctacgtttcttcaatgaggcacgtcgacgcattggtttcttgatgtgcgataacgacctccagagttgtcaattttatatgttgtcatcgtacgcgacccatttctttactatcttgggtcattggctaattagatacatagggtatattatagccaaatccttcgcccaatggatgcgtgggctatgattcatcgcgctgcgacgtgctgtctccaaatgctgaccaagtgagtccatttggtttaccttcactctgcggtttactgatcaacacctctagccacgacgtcaatttcgatgaatgggagggtgatatgaaatcccgcgtatactggaactgcttaatgaacgagactatcctagtgcaagagctgcatctccctcccagtggtctagcccgactcgaggagttcgtgcccattccaaaattcatcactttcgaaactgttggcttggtgccccctcgatcctcctcacaagaggtagacgactccttcttccaatatcatttcctcgcgcaggtcgcccaccgcatcatcctcactcgcatccgccactcattgtacttctactgtaagccacataccacttcaaccttccccttcaccggattcaatataacaatcagtcataaaaactaacagtgcaaaaaacacacacagccgactcagggacattcccactcccagctatcaactcagagctccaccatcagctggagcaatggcgtctcaacctcccacccgccatccaattccaagatacccacgcaaccaccccggcaaaccccaacaacccaactaccacaacccccatcacatccccgtcaacccccatctcccccctccctctagaccccaaccgtcccctgtcccccgcaaccgccgtctcagaagcaatgctccgcggccgtttcaagatcgccaaattccacatcggccgtccatacctctacaaggccctccgcatccctgcctccctctcagaagacgacctcggacaagtccgtagcggcctccaaaacgccatggactggcccgtcgtcggcggcgtcttccaaaacatgaaaagttgcattccgatcaaattcgccttttgttctcagtatgtctccttttccttcttcccctggctcctctcgaacaacatcatgtttcgttaaagtggactatcaaaactgattcgatgtagattcttcggtcagatcctcctcttctattgtatttctcattcccccgatgcccggctccggagtacactgccccccgactgggagcgctggagccaggaaatgctgcagttcttggaagattgtgcgccttttagtcctgctgttgcgaaggatttggaacttttgaggcttttatgattactactttgaaaattcgattcttctgatggtttactgtcttggttatattaagtttgggtggtatatttttttcatgtaaactatcgttctgtttttcttttacttgtatagaatattgggtaatgttcaatgtcaggttacgtatgtatatgagaacttctggattgggatgggatataatctaacaacttgtaaggcaaatggtataaacatatcgtattctttcatacggaagtcgctggaatgactcccgtcaaatcggaaagagaaacgctccaggatataactcattaatagaacgataacggtacaagcgaagtgagcattgcatgtaaacattgccctcacaatgcccagtcgtctaccgcgtcagaggccgttatgaatggcttatcaatatgtttgagcgcatggtctccgcagaggatactatccatgagttagctgcacagtgtttttcttgtttggtaggaggggggagatatttaccaagcctctgctatcaacccatctagttctttgacaatctcctcccgtcgagatgagcttatgtcgctcttgtttagctgcgcttgtaaatcccgtatatacttctttttgccaccggctccctcaagtacttcctttcccaaacagtcgctatggaaggcgtgttgacatgggaaaacgaagaattggcgactcagcacaggcaatgaacaaagccaacacttttctccgggttcgacgatggcgtagcgcatatccagagccgcgatttcagatcggatttgtcgtgccgtatgtgctgagttatccatttcctggcgcagggcgtcaatatgacgagagtaatcttccagagcactgcatatctcgtccttgaaatcatcgatgacaacgaagtctggaaagaacgggatcaagtcttcgatgcggaggagttcgcatcgccgaaggaactcaatagcgtctttgatgccggttccaggttgttgaatcttcttctcggccacgagaagccataatttcttccgaagcttgtcgttcccttccggtctatcagcaatgatagctgctagttcaatatcttcatgctgcagagccagctctactgcttggagatactgtcccatggcgctgtagatatggatgcatgactgaaagcgctggtgttgaatacaaagacgaagggcaaaatcggcatcatacgggggtggagttgaagcttgtgactgaagataggttaagagccctgcttctgaggaggagagactcgaagcatgtattgagatgagtgtgttatgcactgcaggtaatggttttgggtggttgacaatgataaaattgaggtaccggaccgcttggttctggctaagcggaacatttgtcattttattgtagttcaagagagcaggtataagtttctcagggtcaaggttcgtctggcgcatcaagatatcgaccaaaccagtagctgcgtgggtcataagtacactgctgtatttgtagaacacgtcagggtgactttgtctctggagaacattcagagcctctggccacttctcgcgttggatccagtaagaaagcacatagttgtgatcgctgacggctgtggcgaaatatagcagctcctcttcccgaccgtggctactgattatgccgtacaccgtcttcttatcgaggtccgatttatacttagtgacgaactcctggaactcagagcggacagtactgagttggcctttgatatcttcggtacttgttccctccgccacttcagcgctggtggctatgttgtcgtccagggagttcaatttggtcatgaaaacctctaccaaccagcttgcaaccattatccgctgcattgacgatgattttttgtaggttgataattggccaagaaggtatttccgcaaagcgtcgtgctccccaccattgatcagagtcaaacagacctcctcgaatcccttgctactcttaccccagactttggctgcctcctgaaaacggcctttgctggcaagaaagtcacctgaagcagtggaaacggcatccttttgtgcgctggagcgtgcgtaatggagggcttcatcaaacatttgtttctgcagaaacaccttccagatatctctgtcctcgtcctcgactgcgatttcgaagatttcttgattggtgaacaaccagtaggtattttgtgtagagtctgccaagaggcccagcgtactctgtcccggctccaatacagcttgatcataaacaatctcttcgttcatgcggttcacggcaataaccctaccctcaacgagggttagaatatgccactgcgaaagcgtcatagcagtaataggattctgaataagtcttttgcctcctcgtgcagattcagtagctgggaaaaatgaccgcggaagcatattcgcactctcaaacggttggttcactttgtcggaagagtatggaagctggccatgatatacaccttgggagctaagccacgcaaactcctttgcaggattaccatccgcaacgcttggtgatatggccagggttgaaggcgcagcgtttgaagccttttgggcctcatgcactaagggcgtttctcgttggaagagatcagtgtatatggagcctccaccttctcttccatgtcttcctgtccgccctaggaaatacgttaacttgccatgtgtcgctatcaacacgcgcctctgctccgactgagtttgaaccaactccgcccaaagtcctgtcaccggcgacgcctccggcactttatacacagcggtgacgtatctctcctcgcggcgatagaactcggtggagggttcgatataagcctcatatatatagccatctgtagcgcctaaaagtatgtccctcgtagaagcggtcggaagcgatgggttccaggcgatgctctcaattgaaactcccttcaaccgcgacagtggcttgggttgcctcgactgagtgtggagatagtagttctcgccaagggtggtggtaatgattaagtgggatgcggaagggtccaggaacatgcgacgaataactcctatttccgaggacttctttggaaggtcgatgtctaaaacggtcgaattaacatcgcaacgaggcggggactccgagattcagcaagccacaaggcaccacataccgtctatgtcttcgggagcttccaagtctattctaagaatacgattggttgcaagagccaggatgagtacattgttcgcaacttgcgcagcgacgaaatccgcagcgagagggaactgaagctgaacacgtcggacatcgaagagtgcggagtcgggggtttcagttaagttgctgggagcaacataaccgtttgatgcatccagcgccatgatgcgctagtagtgacaaaaggcactatatcatagcgggttccccgagggttgaggagttgctagaggagcttgtgtcaagctgtcgactgaccgattgataccgatagggcgggatggggaagctagacagctgttgatgccttggcatgattcttcttgcctgaggcatacactattcttgttctattacatcagagaagcaattattatagcacaaccagttacctactgtagaccagtttgccacggataagttcgatgcacatacagactccttgtcatacagagtcccacccctaccatctatttctattgtattcgctcgtagtctatacatagtaacaccgtcccaaacttgcatgactgagataaggaaaaaataagacaagtgctgggtatcaagtgccttcctctagaaacgtgaggtcatgagaaagcattaatcatgaaactgtcaaagagtcatcgttcacattattgagcactcccgctccagctttcgcccaatcttctccctagacttctccttggacttccctttattcttggtgctttcctttccgcgtgtagggcttttctcgttgctttcactgcttgttgacatagccccctcgcctggtggcatattctcaacggcaaactcatcgtcctcagtcgagaagccatcgctattgactttatccctgctgcgtctaccagtaaaacgtgaaaatgtagcactaattctgctttcgctcgtttggcttcctgcacggctgcccggcgtgcttctccggtttcttgaggtatgccgagagaacgaaaaggagttcctccctctatcatcgtctttcggggcaagcctcggtgacgtcggtggaacagttcgtacctgaagccctccagaggcatttgactcaactgcgtcggagaaggccacactatgttttctgtgatttggttccagtgttaggaattctgtatcatccggagcggtgatctcaaagctcggcctgttcgagcggagtccctcagcacggcaactctcaggaagatcactgcccgaggtgcttaacttctgggctattgctgaagtatctaattcctgaacatcatccgacatttcagatgaaggcgccgtgtctgggaggttgactgccgcggcatcttcattgaccggcaggatttggtaaaatagaagatacggcgactcgtgcttcagagctcgttcgatatcaactaaagtcacacgctccgcggccaggtcatcgaatcgcatccaatattggggagtgtccgaaaaagctgtctccgagctatgagagctagtcgggggagcaccagcactggtgcccctgacaatagcaatgtaatgtcctgagtcaacagagttgcctctatggcaaatcattgcctgtaaggacagcttgaaattcccgtatatcggaccctcttcatccaaattatcatcttggataaaatggggtagtccaatctctgttggtatatcaatgaaggtattaagtcgggtggctttaccgtttggtgacataaaataacgctttaggcacatgccgagtaatggtcgttttgacgaaaaatgtgctgcgacctgtgcatcattggtcggtgtattatccgtataccaagctaaatcgacgttagcacccacgagtataagaaatgtaacagtaggtcttacgtatcaaactaaagaactgccatgcgggcatcatgacttctttccgatatgaacctctccgttgagatgtcacgtttccatcgccttctgggccaggaataaagcgttcttggacgatgctgtttcgtctgggcttaggtgtgtttgagccacttgattctgtgactgatgtaattggggtcacttcatccagtcgaggaggtgatagggctgttggggatgtcgaaggggatgggctaatttccactgtctcgacgtgcgtcgtggagcccttcgatagtgagtctactgatttagtggatcccacagtgttacgccgttcaaggtgtcgtttcacttctattcgattgttgaagtacgactccaaacaatcttcgagtgtgacagtgcttccatcatgaggctccggtatcgcaacctctaataacctttcattaacaaacttgtggtcatcgctcgcatcttcttttcctgtatgatagatgtccatttttaatgtaaggaggggcaactccagcgttcctgtaataaacgtgaatgcttccgacgtatcctgctggcgtaacctggcagcatcttcccagccacattcagctagtgcatcctgcaggtgtttggtcttcaaacattccgtcagcgtctcttcccatcgcagtgtaacaaggaatagggcacgtacaatatccgttgttataagttttcctgaccgcagcatgttgacccagagccttaaaagtatgacaagttttcgacgaggctcgtcattgaaggatttgtatagaatagcctcgaagcaatctaaacgagcaaacatcgcaaaaagaagtgcgtctaaataacaggtgacgccttgacggttctctgctcccaggagcttcgtacttggcgtatatccccttatgattccttctatagagtcctcaagaagtagcagcaagtcaaacgctctgtctacatctccttgggcatgtgatgattgtagggcatagccgaagtgttcctctttaagattggtgataccgagctgcgcaatgcgacgctcaaggagcttgatctgctttcataagctcccctgcacaagttatgcacttagaggctacctttctcaccttcttctgttgctcgtctgcatctactggcgcttgggtcgacgaaaagaagccacggaaaaggggacgagaaagaatgtttgaagactgagagagagcaatattagcgaaactaaacttatggaaaccctaagcgatcttgggctgcactgtacctcgtccttctttccatctctgctatttcgctcgcgcctagtaagaaacctgtgaatgccgctcattttgtatgatgtaatgtggtttttgctgattagggttcagagcaggagacaggtgtcacggaatgagggttagatatatgtcgacatggggaagatattagttcaggctccaaaatttccatgaagcgcgcgagagcaattcttggtaatgttaccagacatatcatgtgtccagttcttctgatgactgaaatctgatgtgagtcgaggaagttgcgtatactaggcttcagctgaaatcgtccagtgacatcacatgtggtgacacaagagcgattcgagtggagcgccagatccagcgcgcgacagaggtcagtctagggaagcaaaaagtgctgcgaagccctaaagtcaataacccatgactctggcaccggatcggcagcgatctaaagttatggatgcctagcttgctggatgtggtgcggggatgattgaagctgatcacatgtggatcctcccgctgccttttctctctgcggagcttttgttcgttgcctgagattgccgccagacccttcaggcagctttgtgttaaccacgtgatcatgtcccgaactcgatgtctccgatccggaaaacaatttttgggatgcccaatcttgaactagtctacagcgacaacgtcccctgtagaccacaatggctgccagtgagtcatcaagatatctggcaaggtcattgccacgggcatttgtgcccaccgctcgcccacagggcttctgcttgcggcgcaatgtctccgaccaagcctcgtcgaaggccgcgccggccgacctcaatgagcttgaatcggcgagttctctgacttcgacaacgctttctgaggctactgcaaagtcattcgatccaattgcaaggaccaaggcgcggaagaagcaattgccacgaagtcggtgagtttacctcgaccacattgctatccagatcaagcaccccgtcaacgctggtttctaaccgttaacttctagttatcaattccgttctcccaaatatgatcgtggtcctctacaccctcaccaaccccctccgccatctgatccctcttcccgactctatgttccgggccccttctctcttccccgagtagagcaaacgtatcagtccaccgtcgcgtccgacatcctcaccctctgctatgttcacaaccccccgggtttcaagccaccaccaaaggccccccgtcttcgctcatgggatgatagctccccataccacaagaacaggccgctccgtggaccccgaggaggtgacgtcctccgtcttctccggaagccgatcaatttcaataatgtcccccagctagaacggatcaccattcacagctacgttaagcaggcagcccaggagaattcttcatggttgcatgttgcaggaatggctgtccaggctatatccaacgctagagtagaaaccttcaaatccaagaccagcgtggccacctggagtattgcaccaggcagagatactgttgctgtcaaggcggagcttcgtggtgaagatatgttgcacttctttggaaagctagttgatgttgttatgcccaggatcaaggactgggagggtgtcaagggtagcagtggtgacagcagtgggaacatcacctttggtcttgaacctgagaacgtggctctattccctgaaatcgaggtgaactatgatatgtgagtctagctatgacgccagtaccgaaccaggaccccgtaacacattagctaacgtccgttcgttctctaggtatcctccgaagatgattcccggttgccatattaccatccacacctcagccaagacggacaaggatgctcggcttctcctcagtgccatgggtatccctttctacggaaagatggttgactaaaggagcctcaacgatacccttcttggggaaaatctgcaagatttaatcaaggaacgcttgacgaaggccagacctgtacacccaagcgaatgtttgtactctcatctttgttttcttggcattgaatatgtaacattgaagttttgttgactcgttaaattcatgtaaaatatgctctattctattagaactttttattgcacattatcccatccgctgtgcttaggcgtttgatcgttcaagagtccatagtactagacacctacatcctcgcttgtggactggactgagtgtccttgatacaaacacacaacgccccacccaaagctgcaagtctcaatttgtgaacatatgcgtatcattaagcttccagaaccccgcttattattatacaagaatggaatagtttaacttcgtggattgagaacactttatgttcagttctatacaacatcatttcattatatgtccgccaatgaaattaggtttggcgtaacccagagaatttgatcctgggccaggttaatggtgaagtaaccaaagggtgataattaaagcacaagcattcaaaaattcatagatcttaaaaatctcaaagtgcttagcggcatttacgcctggggtattcatcaatctcgatcagacactgcaaaaaaaattttttttctctttttggtttccacatccaaccaggctggtttcatgcaattggcgtggcgaggaattgacacttcgaaagctcgtcagcactcggccgttgctcataatcaacctggaatgtcatgtccaggaatgcaacagcatccttgctcgcatgctctggcgcaggtggtctggctttgttgctaccaatggcgaaaatagcctgcagctgactgcagtcagggaaagggtgagcgcctataaacatctccacgactaggcatcccaagctccaaatgtctgccttcttagtgtgggcggtctgtcgaacaacttccggtgccatccaatatacgctaccctgcagcgacggtcggtgtagatgaccacctcctgtgccgctggcccgagagccaaggactgtagaagcttccacccgtttggagataccgaaatccgagattttgataccacctttgttgtccacaagaatgttcgcacccttgatgtcacgatgtataatatcgcggctgtgcaggtatgagaggcctgccaaaatctgtcgtacaaaattcttgattaaaggctcttggaaagtgttgtattgcttgagcattgtagcaatagatccaccgggaacgtattccaggaaaatattcaaatactggtcatcagcagcggtacccagatactggacaatatttttgtggtgaagtccttgcaggagttcaatttcatgtttcagtgccgtaaccatgctgttcttacgtttgtcgaattctgtgccttttgttgccgatggtatctcaacttgtttgaccgccataagctcaccagtgatcgcatgcaatgccaaaaacacacttccaaaagatccttcaccaatcaaagagcctttcatccaatttttaggagcaaagttgtttccagcgaggaagtcattaagaccgtcatcttcctcttctccatcttcagcaactagaacgctcagtcgttcattgagtgagcctccgtcagttgcagcaacacttgcattctcatccacaaggctctgacgagatgtgctgggatcgtccgaaccactatcgaaagaaacatatgatttgcgatttggttcaatgggggactcttcctgaagcggttgaagggagcttgacgcgatagaatctctatatgttgcttgaggaaggctaaacttggaaactgaaagaggcctcgaagcgcgagtgggttgagcaccagtattaagccaggtatcagcaatactggggataggaggtgcatctcttaagctggatgcgtaacttgtattgctcacgacactcaatcgacttgctgcgcggcttaggcgctgcgacctccgaattgacatgcgcatggtcttctcaatatcttcccggtggtgactagggaagtaagatgtgatctcgtggataatcatctcgctaggcggtcgagccccaaagaacgatcgtaacttggacacggcgtgtcgctccgtattcagcacttgcaaatcgtgctcactcgaattttgatgccgagcagacatgggtgaaatcggttgttttatattatgccaaggttcgccggtgagttgttggatcttaaactgtgtgcgtggatttgagctattcagggcattgatatgcgtcgcttggctttcatcaatggcgagttgagaggcacgccgaagctcgtccgtgtctggctctccagcatgaatcttccgtagtatgagacgaccacgctcagatttgtggttactttcacaaatctccataagctcatgatccgccagcctcctgcagttcgacgggtctggttccaggccatctaacacatagaagcagtagttccgatattgatgctcagggagttgcagcttcttgagcacgcacagtataatttcatcagccgtcttgcaatgcttgatatttaagacttttgtttgtccgccagtatagattattctaataacaggcgagttagggggaagagaccccattgtcaggccatcaatgctagagttttgtcttaaatggctcctctgcccctcgttgggggtggatgggttccgagtggcaccggaaccaccagaggagttgtgactgaagtagccttgcccttgttccttgcgagcgctctccatcgggctagcaacataacgttgggcccgcaggggcgatcctggccgtgacggtggtttgtagccatgggcattatcagcggtatgagagaagcggcgattatttaaagttggttggcggcccattgaggggcgactagattgagatgaggcaggtgtatatgctgactcaagcgcggccaattgatcctgcatcgggtcagtagaagctcctaacacacaataccttgatccgcagtaacctactatgttcttttgttttcggttggcaaccgatttgttcctgagctgcttaatggcgacgaaaatgcgcacccgatcaccgacttttttaatgcccatctcttgcagaatcttctgatcacactcgataagattgttgccattgaagttgttcgctatatgctgtcagcgtctgttcatagcgcgcagctgtaacatcagtgagattcagaagctacctttgaacaaggattcatattgcccacacttgatgctatgtaaccatgttatgacctgtttctcatcccaggatctatcgaggtgtcagttgcccgcaatatccttctctccatagtacatggataacgtacctgactgcctcaagtccatcctgtgcctccgagaactccgactccgtggggctcgtgaatgacattccatcttgatgcgttgtaaagattgctttttgggatggtccagagtggtaggacgtcgttggtgtctgggatgtggacatccccaatggagaagaatacgtagcttttgccagcatggttgaaaggggaagcaaccttagagtctcgtcccaattgtccggcaataactatagatcacgtctgcaagcaaactgtcacccccttatcctttccccctgtgtaactggcggaaaattggctcgtgcggcgttgtggaaacgtcaagtccaagcagacgtccgaaatcgtctaatgcatgatacagagtagcctgcaggattccaggtacatattagctccatcaatttcctaaaaggggtttgacagacgaagacaaggatcaagcgagcacagatttccaaatatagaagtaaacgagatgagggtccaaaacacgggaaatgggttcgtaccgatcaaggccaatgctgaaggtcaacacaacagcgactgcacagtgaatcgcaaccgaacccaccggttcaactctctcatccaggcttacgctcgagtgcactctgtggaaggttcacgatcgggggttatcagcgataacgttcccactagcggagggaggataagaggggaagaaaaggcgagacgaggtgggatagcgctcgaggttcggagaagggcgatggacagtaattggtgatccctttgggaaccagatggcgaggggaacgtggtggagagggaggaaatcaacaccgttgctgtgctcttctcaccttaaggtttttgctggtatctaaaaccgtctagtctcgttacagacttggtatctgtctgggcccgatcggaggggggggaaacgatgggcctccgacatgcgtactgagtgggatcttctcaaacacgccgcgccggatgataggctgtcagggggccggatctgaaacaatggcccatcagctgctccctttccgagccttaggctccttgccctttcccggtttagcggcggcatcgaacttttgcactattcttaggcggtttgcgccgtcgcttctaccctggttccatggtttctatgaacttcaatcagtgaatagccgagcaattgcttaattgtttttctttcattgttattttttttgtgtaccccatttggttgaaactgaatgtgttacaggtttggctgcttcttgaaatattcttcaataactatataggcaggcaaggtattcataaattactactctgtacaatactaacaaaattctatacagcagtaaatagataaaaacctggggttcattgataggtttgattatcaactgctccgcacacgcaccagtatctgcttagttagttagtatgtttaccgacaatttcttatagtacgtactcctgatttgtaaaagcggcactgcaatatcagactgaaagaaacaaaataaaaaccgtagctagtagtatatttacctacgaagaacaatgctatcacttattcatgtgggtcacttctatctcaagtgcagactataatttagtggaattcatttaaaccgactgatataaaagtaaccagtgtgaaaccagctgacaactgctagctccataatgaggtgcgtccttatagtaattttaacatcgattgaaagttagaggatatattctagtcctgatggatgttgtacaactggtctggcgttcttcttgatggggtcctgtgacaaaaccaacagaagatgccatttattccatacaacactggtaggtatcttataatttctggattccaattgagcgatttgttgaaaggtatgtaaggggtaacgtccattcaaggaccttcgtgttatagtaataattatctggatttaccctatcgttttattagaaaccttatcgatgtcagggactacatagggtattatatactccgtacattttagcaaagtaatagcatcagatgcccgctgcttccatgtaagccaactttaaaattactacaatgcaatatataccaaaagaatcaaaccgagttagccctagagttgcatgaggttgagacgtgtggatattccctgctagctattaagcaacagtaatactatgttcatccaaacgcatttcaaaccactagagaatacaggaacaatcacatttctcaagaagctactgttctgattcttctggcttattgacacccagttcttttgtcaaaggctcgtcatgagcccataaaggccaatcttttcacaaccgcccaagcattattaagactgcgtgcgtacgccttgatcatagcaacataccgtctttcaatgccggtctatatatttaacaatctgactaagcacgcttgcttcttgtgtaagactaaagatgcctagcaccagaggtacaattagttgtcacgaggacgatgggatcatcccgttgtcccataaattgtcaacagaaagctcatactggaagcagtcagaagaagggtacccaactaatcaaatccgggaagtttcgagatagaacctatgatatccagacaccttcgttggtttaagaagtgcgatgactgtagccaatccaatgccacaaatcaaaaaaccaatccagagaatccaagtccaggaagcagcctccgcaaaagaaccacctattactggccctgtaactgattcagtagtcaataatgcgtgatcaatctatgtccctcgctcgcatatgtacaagatcggtaacgacgatctcgattgggctaatgatacctccgccgacagagccctgagtacctcgtcctacaaatactatagcaaagctcccgcatacaacagcgataatgtggcaacatacttgcgaccaaacgttagcgatcaaagacccaaatgtaagctaggatgccgtgttggcgagcaggaaggatgcgccggtccagaaaacttcaatcactgaacctttaagacattgggataatatctacaagaattgcgcaatactctaagtgcttgtagaggtagaagatttgcagggagtcaggcgtgcatgcaaggcagttggcaatgaggtggcgagcaataaggccacgctaggaaatcggggaaggatccaggtatttattcaataggatggcttgacgaacttatgcacaccaagagatatttatgttatatgataagaaaatgagtacctagtatgtagtctgatattcattcaggctttgaatcatcatggatgcgaattccctataatttactagaaacctctttttacttcttgctagtacttatgccccctaccctctctcttttctttttacttctcttgaaagataactgttgtagttcaaatgagataatgagtacatcgtagatttacttcttggggaaaaaatctttttttctcctttgcgttactataactaagaatgatcaatatctagccgttgttggagggcatgatgttacactattttaatatcgctaacacggtcaatgtataattcgagcaagttccaatgactaaaaccagcaagccccctctttcttttagataggcaggagtaactctagtcactggtgaggagacgtagggtgtatgatgctaaggttgtatcgaaagcaaatatctccgcaccagtggggagggcggagtgtatctgtgtccattagtattccgatccttacccaagagacctaccgacaaccacgattgtattattcctctctcctcaatcagtcctcgaaatagttcaaaggcttcattcttctgtaagccaccacacggaatctatagctcaatttgaagatgtatcccagtccccactggaaacttcactgactcctgacctagtgactttcaagacaatttaaaaaggtaatggtgactttagggctttgatgatcagacaacacgagtccaacgtccgcggcagccacgtgacccccctcgcaaaaccccctcatggcaaccccacagtttttcttccccgctcgcaggttatccatcaaaggacaaatgctccaattccaaggcaattcgctatggaggacgagagaacttcccctgggaaagtgagaaagaagtccactcccgccaaccggaagtccctgtcttgcgaatattgcagcaggtcttttgcgcgtctggagcatctccaacgccatctccgcacacgttgagtaaccctgaaagacgtcccaaattggaatctgcctctgcgatgtgcactgtattaatcgtttacctacagacacgaaagaaaagcctttttcatgtgacatatgctccaaatcttttgcaagaaggtgaacacattttgctcttcgaacacgactaatccacgctaatccggggctttacctgtctgtagcgatctgctcgtacgacatgagcgactagttcatccagcggaggcagcagccaatcgcgaacatcgaaacaatagcaatcacgatgtccctcagaccccgtcatccataatacaaccgacccaccaagagtcgcgcatgctagagcttgcagatgccattccagttcaaacacaaccagttccgcagcccccaccagaggtgcaggtccaagctcctccaatagtcgaaacaactcatttcaacccatcctgggggtacgacctaaacctgctctcccatgctgctagtcatgtggctcttgagggccagcaggaaagcctcgagtcgatgcgtaagccctcgcagaacgtaggtcccccccagccgttgtctcaggttccggagagagcgatcacagacaattatggcgtcgaaccttctttcctggatctcacagacttaggcgaccccgtccaagactttaccgtcttcttggaaagcgttggcctttcttctgattgggactctggcgtattctcgtcggtggaagagcctatgttgacggcaaatattccaattgactcaaagccacctattcgcgaaagtgcgagacttggggcagatatgatgagtgatccgcgtggcccagctgacgagccaccgtctttttctaattttggatcccggctaccgtctctacagccagagccgcaagacgttgatgatcgtcttgtgtttggtgacgaaggcccgcgtccagcttgggatatttcgaatacagatcgtcaaatctttctttctaaactcgaggaatttgcttatattctccccaagggctttatcccaccatcgagacatgctctgtcgcgcttctttgctggctacataaacggactaaacgaacacctcccattcctccatgtaccgacactgtcggtcgcaaaatgctcccctgagctcaccctcgctttagcagctgcaggatctcattaccggtttgaaaacaatcgaggaatcgagcttttccatgcctcgaaagccattcttctgcagcgcctccagagaagggatagcaagcaagtgcaatgtccttcatggaattttgtctccccgccatccggttttcacgattcaaggggctccactactccttccaacaacgccaatagcccgtttcagcaacatcatatcccgcatccagtggagtcaccctcgggctacgccccccaagattcggacgctcacatggaagtaatcaggaccttcctactgctcacagtgtttgcttcttgggaaagacatcctgaactattgcgggaaattctttctcttcagagcacattggctcgacttgtcagagaacatggacttactgagccaacccctagtgccgatcccaacaactgggaagagtgggtacgaagagaaggtaacaggcgcacaaagttcattgtatactgcttcttcaatttacattctatcatgtacaacattccaccgttgattctgaacgcagagctgaaactgaacatgccatgctcacacgacgtttggaaagccaacaacgcaacccagtggcggcgggtcatgcgttcacgacatgggccggaagtttcatttcaagaagctttcgctaagctattcgtcaagcccaatttatcaaattcatcgacacccatatcaccgcttgggaattacattctcatacatgcccttattcaacaaatattttttgcccgccagctttgtttgtctgcaccaatgatgcaaggcaccagcctaaggcaggaagatttgtccactttggacaattctttaagtgcttggaaagcattgtggaagcgcacgccagaatctagcattgaccctcaaaacccagcaggcccaatagcattcacgtcgactgcccttcttgggctcgcctatattaggttacacgttgatttaggtccctgccgccgcctcattacccaggacccggttcggatcgccagggctctaggtgaatctccacctgtagcacggagcccgcgcctcatcatggctttactgcattctgcgcacgcactttccatcccggttcgcctcggaatagacttcgtagcgcggacccattcatttttttggagtattcagcactccctttgtagcctggaatgtgcatttcttctaagtcggtggttactatccataccggtgacgcaggcagaacaaagattgtcagagcatgagcggaagttgctcttatggattaagagtatgatggatgagactgacatggccgttgatccgccaggcgcacctgatgtggactttcttgctaatccctataaggcaaagcaactcagcattgctattgttcgagtatgggcgaggacattcaaagggaatacaagctgggcgatagtggacttggtcgggtcgagcttggaagcttatgcagatcttctggaaacacagctctgatgatctccctggttttatacatgcgctagcctcgtgggaagtttgtgttggaataaagcacttagcagggcagtggtagcttatccgcgacagcacataccatggcagctgcaaaatgcatatttccatgctctatctgcccattggctgatgatgtctctgaatgaatacggccagcgcaatgcagctggtcttcgccagtcataccttctctcttgttgctagcctggtcagcaatagagtagttggtgctgcccgagtcggtagtgggatatggcagcttgactcttgtgatactctggatgatatgtgatgttattatatacccctcatcacttactcttcacctcctaatcatgtatataaatgtaagctctctcgttaaggaggctgaaagtgttgcgatatgattattacgctttgacacctatgtttcctttcgcttccctttctcctacttttgccccccgtcgcccttgcgaaagtgatgattgcacgctttatgttgtcccttgtttgtttttgcccgcccttagaggcttgtctctatcaataatgatatatcgcctgcggaaggtctttcgatttgaaattcaatagccttgttatatatactcatcagcacgtatattgtgaccatcagtaatttgttactttgttattgaaccactctgatcagttggatcgtctagcatggccccttgtaacgctcgctgggacaaaccgcaaagcagacatagacctctcgagttgggctatttccgattcacccatttgtagctgaggggctacgtcctgtccagaaaccggattagcatgagatagagagctttgtcggtgtctaagccgaccttcctgcggggaagttggagttgccgagattcgacgtctatgcgagttcattggccgtagcatagatgtctgcttatctataccatcgttcactatgtagaagttgtaggtctgtggctcggttatgtcagatactgtgcaccgacctggtctcccctgggtaatttaccttgggaaacatatgtttatcaatcaagtgcatcctgcgtttctgcggcgtcgagcatttccgctcacaatcttcaataaaacacccgtactatattcgatcgagcattgtgagccacagctttgggctgtaaaacaaattgctcaatatcatgggaacgtacagtcttttctccccgatcttttttcgcggcaatcagaggatcatggttctcttcgatatgtagattcaagaaccggtccgtggggaagttctttccacacgctgtgcatctattaacatgcgtttgtttataatgaacttcatagtcatcatatgaggggaacgagagcgtctcccgatgtggtggcagcgaacaatgcattacttctgtgccagaattggcggtatcggatagatgttttttgggtcgttcaacagaagtgatggaaaatgccggtgacgagggccttgaactggtctctggaggttcgccaacagagggtgatctagagatgctccgggagcgcttggacatcctggctgtctattgctcttatagttcactcgtcgggttgggtggatgttatgcaagcgtctcctgcaaggctcattgggtacctatgtatgatgtgttctcgatgactctgcgaaggatccccgccaaagttggtattggagctattatgtgtttttattctggtttatttcaatcaaagctcgggtgatttcttgaacctctatttaagaaggaagaggatcttgatactatcattgaaatctctcatcgaaacagtgtgtaatgaatgaaccattacgtcctgtcctgtcctgtattgtactgtaatcggttcctggacgcaccagccacagccgggcaagccaatcaccgctccacaaagccacatctcatccgattcaacgcccgtctttttcggtcgccgtccagaagttcccgtgatattgggattttctttacaacgagcggcttgaacccctcgttcttcgttcctgcgcgtgggagcctatcttcgttctattcccatttgacgaccccatctcggtgcagtcactctcggccttgcttccgaccagcgccattccacccgttctgtatatactactgatggatcgttcactgctctcgtcgcccgcagacttccagccagccatagccatctgacgggcgaagtcgacggtggagtgacaacgggcttcgtttcacccatcccgagcatggcgtccgcgtttcagaatacgtggcagtcagtattctcatatattcttcagaaaagaaatgaacccgactttctgaaccgcaatgtacaggattgcgctcgacatcgaaggagagcttctgaagagccttgccgagaaagagccgacatttgctgaaatctcgcattacctctctgagtcagtttatctccatctagttactaggtgatttatctctcgtgtgcattgtcctgacactctctccgttatcgcagactccgcgcagcttgccagaatgccatcctccaggactttgatgccgctcgctccatcgacgtggaaactcgcctttgggatgcacatctcaaaattaataatcggtttcgtaaactgctctctcgcgtgagtaactcgggctttgggaatctctatcgatgagactcgtctaacctaccgcacacgcaacttagttccgcgagcaaaacgacaagaagaagaaaccagtagagcgacgaaagcttgagaaacattatctcgaattcatcaaaacaagtcagcggttctacagaggatacatccagcaattgtcgtcgcatttcgggggaattccggagcttgaaaacgttgcgcggaaattcaactttgacagtgagcaatgccgtcctacccttcgtaaacccccttactcagtcaaacccttgtgttagatttatctgtggaggattccatggtgcaaccggtcggggaccttcgaaaacgaattctgcagtcatgtcatgctacccttatccgtctcggcgatctctcacgctaccgcgaaactgaactggttggcaaggaccgaaattggggtccggccataggttattatgaccttgccacagtaatatatccagcctctggtgcctcgcacaatcaattggctgtcattgccctcgccgatggaaaccacttgcgggccacttatcacctctatagggcactagccgcccaggaacctcacccatctgctaagggcaatttagaaattgagttcaggaaagttaggaatctgtgggctaaaagagaactgattcgccccgaggatgccggtattcctggtagagcgttggctccctggtttgtatatctgcatgctcagtgttacagaggcacggatttccccgagcatgatgagcttgaaaatgaggtattgaatcaacttgctgttgatttgaaggagcgttccctagagggcaccctacaaaagttctgtctagtcaatatctctgcagaagatttttctaggacacgcgccaatggtaagtccccaagtatgatgattgcaagagccatttttgacatatacttcagaagagtccgtgtcaaatgcaggtctctttttccggcgtattaatgtgaaaacgttttttacattacttcagatccttttggctgaagtggaacggttcgcggtcgaagaatcaaataatagggaaggaaagaatggtcctgataagatcaccgctgttgcacgacgtgttttgcctgctctccgaaactacagctcttggctacttacagtcagccatcttctagtggctcataaagaggagaaagacaccccactttctgtccaaataattgagttctggaaaatctacgccaacacactgactcttctcgcatccacattcgatgtagtcctccttccggagatagactaccttttggaagaagatgaagagactctgtgttttgtgccgctaaataaagaggctacttcacgtagatatttagatacaagtggccgccagaagcctcggatgaacgatctaggagtggaaagaaatcacccaaacatggagatgctttaccgaattcgcgaattcgtgattgatgggttggatttggttgtgagcaatgtatgcagcaatcttctccctctgtctattaaattcagctactaatacgtgctctaccttcagaaaatccccatagctctagtcgatgatggtgacaaaaaaacattcatttacaaggaggaagggcttccatctcagttctttgccagcccctcgggacatcaccataccatttcctcggcgagtattgaacgggaagacatccaacaaacaacacaagatccaagttacgctgccgattctaaaagtgtttttggaggctctcagtcagcgtcaatgtcagccagtatgcaccgcattgttgagggtgtggagcgcttggttgaatcagactgctatgaaaacaccccagcgttgccggagcatctcgtcttcccgcaaaacaaccagcaacccaaccccagccatatcttcaaccctagtacggactcaatatttcgggaagagagcattcctgctcgacagacccccatcgctccacctgggcttggccactccatggcaaacgctgctgctctagccagagtcccgtcgtcacagtcatacgcgccgcgaccctccctccctggtatccctagtatatggaatgtgggcctctcaccagaggttggcgatgcaacttctcccaggaccccaccaggtcttgggcaacacccgattcaacattccggtcattttatgccaggaagcatcagtagcccaagccatcacctacctcaggactcggctgtgaacgatctaatgcttcgtcagagtctaatgcaccaatcccagctgcaaaaccccctgaatggatccagctctatatcctcgtggataccctcgtcaaaccccacatcgcaccaccgtctttctggcttggggtgggacagcagaggaccactggatgctgcaagctctccaccacccctgagtgcacccagccagaccattccaagtggcttggccaatgcctcgtgggcaaatgatgcgttcctcgctaacacgctctcctcaggcgcaggttaccccagctctgggtccggtggcagtcgcaagtccgctacccagtacggtgccattggtcaaacacctccctgcggacatggagggtgacaccgatctcttgatgatctgagtttggggaacaagtctccgagagtcttttgagacaaaagcacacacgcaggaaacgcgggtgtaagctttggttacttggctccgatttgtgagcgtcggaagcccagcggcgagattatgcagcatctcccttcgctcccatccgttggtccagttcttagcattaatagcctgcttttcgtaagcaggcttatgcactgtcacattccccgcgtgggctcattggccgtgctgtcgttaggccgctggtaccaaagatacagtcatgttcactggagaggtattggtgaaattctgtattaaataagcgttctacaacatattgatgaaatcaaaaaggagaccatgtattacaagttcatgcgttcgtggactcgtcttcaggtcataggggcgaagggtcgggataaggattacgagccaaattatcagtttcccagatttacttggattatctctttctttttaactatcggagagctgtatcaatgagactactcatttagaaactaaattccgagagctgggtgtccaagctcgcaagctgaataggagcatagatcgttgaagatggtaatagatttatttatatgtatatcgaaccggatatgcggatcattaattcgttgttgagaacgtcatctctgcaactcctgtctatcacgtaaatcatcaggcaatgggagcgcaactctcagaaagatgttgatggaaagaagtctaagacgttaagtcaaagacaggtgggtattagaaggttgaatcctaaagaagaagaaaaaaacagttctttccttgtcaccgcatgctatccttgcagcgctgtttaggtgatatagatagaaaagtggaaagtttacgaccggttggtgggagtgtaagccttcttagggaaggggaaactaaatcattatgtcagccaaccattctctgacagagaagacgtgcaatccgccatttgtactagccagtaaataaccacggctaattttggtgaaaagcaccggctcgcaaaggacgaaaaagggagctacttacgaaggccccaactcttggatgctaaggctggcgagccactggcccatgtccatgctctcttcaagagacttgccttgcacaacaccagcacagaaaccaccagcgaaggcatcactgtaaggcacgtcagtcatatttatattttgactgggaaacgattcacttacccggcaccgttggtgtcgttgatgctgtccttagggatctcaacaacgctgaactccttaacctcaacttcgccgttgggcttaacggtagcagctacagtagggagagtaccctgagtcacaatggcaactcttgggcggctgttgttcttcttgggcagctgagccaatttcttggcgatctcaacgacatcatccgtatcccattggtggctcttggagtaagcacgagcctcagtctcattacagaaggtgtagtcagtgtagggcagcacactgtccaactggtccttgaagaactcagggatgaaaggggccgaaagagagagcatgaagatctgcaagagtgcacatttagtactaatccattgaaaaggagcatttgaataggttgcattcagtaagtcgtcacatatacataccttgttctttgcagcagcctcttcaccaagagcctggatagcgggcacacacacggtaaggtggtagccaccgacatagtacacctgagccttctcaacaagagaccagatctgaggctgcttaaggtgctccaacttgtactcgttagccgcagcaaggtgggtgcacatgctacggttgtggccagtgatgatcacgccgcacttgccggtaggctgggcatcgtccacacggtactcggtgtgcacaccagccttggtgcaggtgtccttcaggatatcggcgtacttgtcacggccgacacatccaatgtagagaacggagttgtccgggagaatgtactaaggggcggcattatagttaacatacgggttatcgagaagaaaaaaagaaaaaaagaattcaagcataattcaggccatacctgagcgccacgggcagtgttctgggcggcaccaccggcaatcaacttagcatcatcgttctgcagaagctcctcgtagagccccatatgcttgtcctcagcgaggatagcatcgttgtccttcagaccatacttctgaagaagagcagcatcactatagtactgtgtcagtacatgtactatattcaaaagtattttcactggccaaggtctgcaacatacccaacaacttggatgtctgtatattacaaccggaaaaggacttgcattagcattgcccccaaatcacaaactttacggtctctatcaagccaggcaggataatagtcctcacgtaccgaggagagggttctccaagcaaagaaaagggtatccttgagtggcagccattgtcgtttatttcaactagagaaagtgcctgtaaagaaaggacgagcgagaagggacgtgtggagaggaagggaaaatgtcaagaaaagaaaatctctgagaggaggaagaagaggagaaggtgagggtgagaatgcaagaaaaggtgggggagggatgatggtccggaggggcagcaacagaaagaagatccggatcatatgccgtaccgtactgtacggagcgtattgcatcgcatcaggggagtcgccgtctacaactctccatactacaaccacctctttttctgctatcgcataacttacagtattcgccttccacaatgactgatccagccttaggaattgccgagaccattcagacggcctccatcaatccggaaccatccccaagtcatgacatcaatcctccgaccgcatcttcggagaagcagcctgtcgctgaagatgcgccatccgaggctggcagcatctcatccgacatcgtggacccccatcgaatgatcagacccgctccaagacggcatcatcttcctccaatgcctgatttgcgcttcgaacaaagttatctggccagcatacggggtgctgagacttggggtcgtgttgcatggatcaccgttcgagatcaggtatgtgatgtggctcccgctagacctactatcgggaaaaagaagaaaagaaaagagggtctcaaggaacactcaaggctcacgcacctatgttctttttttaggttcttctccctctagtccaaggtaccctctggacccttgctctctccggttggcgattctggaaccgcaacgcgtctctcagcggccaaacattgggcagcagaattcgacgatggtggtacgaagtaaataattggaagctccctcccctcccctcaacgaaggaccgtaaacttgctgcacaggcggaagacgtgagtgactccctaccctgttcatgttatctgatagtgtaactgttcagctcgagtaacgtagctattatgattgaggctgacaatctcggagtttttacagttctataagactcagttctcaaatgccggtgccgattagttgatttgaataaactgcgatttcccccgtattttggttgcattttgggagttccggttacggcgttacgaatttagaccacttcgatggtctttctgtacctcatgtttcttgaggccacgggtgcacatttatgcgcagttggttaaactcttgtagacatttcaatggagctcttctcttaaaaaagatgttatcgtaggactttcatataaaggccagcctgctatccaagagtcgtgaaaacatataaccacgacatacttgcaggctaacacgaacctttcctctgatactaaccagacaaattatcaccacataaacgcctcaggagaccccattgtctttcccgcgtgtacagcagaacccggatgaaaagacacgctccagcatgaaatctatcgatatagccactcattcaatgaccgggggtacgtgacttaaatgctttgaacaccctcgtttgaaccaagagcaggcgccgggtgataggaatgcgacccggtgctcatagcgacacggacggcttcagcacctccctcagactggctgtttgtctcattttggagctcaatcttttgccccagaggtccatcctctccagccgtagaaacggttggcttcgctgcgtctgaggatggtataaattccggaggcgcaggttcagtcgctatttccggtttgctccccacgttcccctctgataacatgtcactaggaccattagggctactcggtaccttccccttaccgtatctgagctgcactaccaggcttgggttttctccgttcactatcgattcgtcaccactcaactcttcttcgtcgtcgccttcgaaatcgttatcttcttcctcctctccaccctgccactcctttccgctagagtgtccctcatcatattcatccatttcatcatccacgttgttgccagtatatccatttgctcgtgtagaccgtgtcctctgaggccgcccagattcttctgcgccagctagctcatcacgctgaccactgagcaagctttccccatacattcctcctgcgcgcgaacgtatctgtcttccactagcggtaaacctgggacccacgggttctgcgggtgaagaaatgcctgagttgttgcgtgtggatcgtcgggtggaaggcaaaccatcggagaagatatcctcatcgtcggagtatgtgtacttcaattttttcccacgcgtacggccttcataaagggaaaatccaggctcaggcctagaaaattgtgctttgcgcgcaatgcggtagtctctgcgtttacgtttcttacaactaattagcaagggtaagacgacagcggaggatcataacttacctcttcggagccctcgaagcgaggaactgaattcttgatcttctcactgagcttcttcgaatgcatgctcttctcctcgtcgagtttatctgcaacggccttcaactcggggattgttcctgccacactccaccaagtgacattcttgagcgctgggttgctctcacggtacaacctaaagtgtgtgtcatctaagccttcgataagccaatatcgacgcttcaagccgtcgcgaccccatggttgaacggaaagtggttggttcaggtcgtcctcatgccgtgcttgcttatacgactctttgatctttgcttgaaccgcttcggaggaggaaagggaccagaggattagcgatttcagcaattgtaactaaagcgtgttagctatccactgtatttcatgtaatttgtagttacagaacgtactcgttcttctggggccatttctgtgaaagtgcgacccccatgaagagggttctttccctgccaagccttaggccactgggatgcatgggtttggatcgcttcttccagagggcgtgtgtaatgaagtcgactgcacatttatgatagctagtcagccttttaccataattcttgaacatcctagttgtagataaataggagctcgcatgcgcccttcgtagtgtagtgggaactgcgtcataggtggtatccatactccacgtccttcttcctgtttaacacgagaccaagcaatgcacacagcaacctctcaatatgctccccggggggcgattctgcaacacctttctcaatgtcttgtggtccgtaatgaggtgctgatcgggggaagacatcgtggaaacgcgcgcggaacattacaacgaacttttggttgcgacgagtcagcaagtatgttcaccagttcatagacgcgtcaaataaacgtgtagagtcttataaaatcatcaattgatggataactcactgcaatgtccggattatctgctaaaacatattcatgtggtggtgaaggtgcccgtttcggcggcggagtctctgattccttcttgaagtacttggtgatgcccacgggctcatcaactgccatgggaacagactcatcatccgatggtggcgctgatgatagcgacgagagatctgagtcagaaagtgacatgttagacatctttgctgaagatggaagtggttgtgttgaaatggaacggaggtgggcgagtgcgcgccgcaagaagttctactgcactactgctgccgattaatggagcgcggcttttacgcgcctggcctgttctggcgtcatcgatggccgctatgctcgcaacccgaacacatcaatgtattctctaacattcaattttattctggcctacatctagagtactgaacaggggattgagcattgatgacctcataatgcgaacctgagacgccgtatgagccagcgtagggtcatttcgcaaaaaaaaaaactatggaggaccaaatgacaaatcagtttctgaaagaccgctaaaaaggagcgatctcattcagaacttgttatctaacgttagtttacagaagactgaacaatgaacacgacgccagttccttactgtggccgggatatgccgaggaagaatcaaagcgatcaccatgagtgacacatcagatgcatcgatccactcgttcaagggcttttcttcctctgcagcggatgctagtggaggattaatccaactaaccactgttgcagtgtttcaggcatcatcaggcaaatttccacgtcgtagtagctgtgaccccagactgcgtggtgtttcacattcgggaatacagtggtattcttttccgaacttcttaaaggccgttgagggcatgttgcttttgtcaaaaccatctcgatttggtcatcattcagtcaggcatggaacaatgaaggtcgaaggccatcaatgcatccaacagcaatactacccaacaacgtcgatcgatgacagggatcctgaaccatcatggataaaaccattcatcagaagactgtttcactgcgagatactcgtagaggtatgtgattggcggaggtcgtgggttgcaacacgcctagtagtcatcgagtgcagctgacagagtagtcaaacaagatcggatgaagaaattggcgatctagcctttgactggataaaagactgtgtaccagctgcgcttatcaaacaagtcaaccacctaggtggtcgcatgaactgttactccgtcagggtactcggttgttctcgaagtccatggttgatgtgacggttagccgcgccgccaaactcacagccgcgcgagagaggcgcacggcgacgctagtcccagctcggctagattagcgaccgcgccctaaagcccacacagcccttccgccgacgaattctcaccaccaacccgacaagcccatcttcgatttgaggtacgagcacttgataaactcccaccaccgggtcgcaggggtctttcttcttgtatactaacctccaggtctctatctagaaagtcgccatgggtcgcgtgatccgcaaccagaggaagggtcgtggatccattttcagtgagtgcgaccgcagagttctgagcgaattccccaagatcaaaattgctgataacaacttcgcctccagcggccaacacccgtctcaacaaggcccctgctcagttccgtacccttgactacgctgagcgccatggatacacccggggtgttgtgaaggagatcatccacgaccccggccgtggtgctcctctcgctaaggtccagttccgtcacccttacaagttcaagcacgttaccgagaccttcatcgccaacgagggaatgtacactggccagttcatctacgccggaaagaacgccgccctgaccgtcggcaacgtcctccctctttcctccgttcctgagggtaccgtcgtcaccaacgtcgaggagaaggctggtgaccgtggtgctcttggtcgtacctctggtaactacgttaccgtcattggccacaaccccgaggatggcaagaccagaatcaagcttcctagcggtgccaagaaggttgtgaagagcacctcccgtggtatggtcggtatcgttgctggtggtggtcgtaccgacaagcctttgctcagtatgtctttgatcccgtcgattggcttagtctttgaagtacagggggtaaatgggaattgaatgctaacataatcttacagaggcttctcgtgccaagcacaagttcgctgttaagcgcaactcttggcccaagactcgtggtgttgccatgaaccccgttgatcacgtaaggaatccttgtcttctcattttgaaggaattaatctctgacctacttgttatagcctcacggtggtggtaaccaccagcacattggtaaggcttctaccatctcccgctacgccgcccagggtcaaaaagccggtcttatcgctgcccggagaaccggtctgctccgtggtacccagaagaccaaggactaagggtattatggtgtggagtttttttgtttgtgacgggttcaaaatgctcttttgctatgaggcacatgtacttaggcgactgcggataacctaccacgcgtccttagcggaataaggttgtggccaacaatttcattgatgattaaaccaaaaaagagggggccagacatcgagtctctgtgtgcatctcatagcatttgccaaaaaacggattatgaatactcgttaataccgaaaaaatgaagaatatttccttgtttgttcatggcagaatgatttctttataccttgtccccttgtacgtttcatgtacccccaacctggtgctccacgttgtaagaattcgtcatccgtttatcagagagcactatgatccacttgtagcccgtcgtctatggttgtctatgttgttccgtgaacagtgtgttcaaaatacaattaggtgcattcatagtgtggtcttggcactgctattacggtccagtacttgtatggggcaatgataaagcttggaagtcgtgaggcctttgcattcgtagtggtattgaaatttatattggcttttagcacttgcgtaacaaacgagttcttcgatagtataaccgattccttaacacatgtatatatatctatatctatgggtatatatggcttgaccaatccttgttatctcgttgccaaatattccccttgacataaaagccgacatcaaaattagtgctacccctctcctccacaccccgaagaaaactaatatagcaagtcctcgtataaccggaagttagtcgacaaagcgccccgaggcgtcaagtatacacagtatggcggatgtcatgtacgcccggagctctgtaggggtaaaaagactgatcttgaactgaccaatcagcggtgccagacaccactgaggaaaacgtccataagctaagcgtataccccagagacagactttcttcgaacattgttctctgtggattatttcatcctcccataaagctagacaagggcctataacatattatacgtgatggatcaggagaatctgcccctgaaactacctcgcctacctcgttgtgcctcgccgaccctgtccgctactgcccgctggcaggcagtggtccaccgagatgcaacagccgtatcatttgtgtacgctgtattaacgaccaaaatatattgccgaccatcatgtccagctcgtctcgcccggagagcaaatgtccaattttacgacacgccctcgcaggccgaaaaagcaggtttcagaccctgtaagcgctgcaaaccccaaaccctgttagcggttaatccccaggcccaaatgattcagagggcatgtaaaaccatccaggcagagatagcaactgggtccaaaccaacattgcgggaacttgccaatcaggcatgcctcacgccaagtcacttccatcgggtgttcaaaaagctcgtaggcgtcacgcccgggcaatacgcggttgccattctcaagggtgaccctaggggtcccctggatgactgcagccgaaatttgaacattacggaattgaaaccatggggtacgggctccaataaccataagcccttcctgtctagcggcttggagggtgctcatagattcaattctggagatactatgcactggaatgattttgacactttgatagccgcggaggctgagattgagtctgagtttgatgcccagtttatggaggacttcatcttgttacccatggaagatgccgctggtgtcgctgagcaccatggcaaagatataggggatgtcctggtgcaacacaaacaaacaagtcgcctggacggggccattcaccctgcaggcgtggagactgtcatgccatgctgaactagcggcttgcttcttgatagctagggtttatcatgggatatttaatagggggcccgctggacataacaaagacggtggttagtccgtgttcattttaccgaacacttatccattgatccatgaaaaaggagaaggagtgaaataggaggagaacatgtgtactaaataatctgaatttagtaggggccaatcgctctacccactcccgcaggggtcctcaggagtcagatggtcaacctgaagtagatgggtagagctgggccaccatggagtcagagcttctggagtacaggattgacatgctttcccgatcgtcaaccccgacatgtacattacaggtgaattccagtttgtattgaaaggtatgaagtttatgtattgagatggaatctaccacttaaatacggagtagttggccttagttatctctttcgcaccacaatctgcaggtgcaacccaccggggcttctagacttcttcgcagaagaacatcaagtggagtttcatgtatggagaggatagtctttagtgttatacggagtagacgaacgcccctccagttcacatgacttcaactacagatcattagaattatcacgctaatacaacatatgatagcaactactcgatttggctgtgtaatactaaatcaactgtttcaatgataccactcaagatacagtttgcagaaacactagaggtctagagaatatgcactgttccgaaaatagtgcagtggcaacgtttgaagactgacaattcgagcagatttgtggcatcgcatccccactcgaagccccacaaaaacgcgtgtcacttgttgcagttgaatagaaactggcctatgaggcttcatcttgtgatacactctagtcacagataataatagacttcaaaccatcccatccaacaggctaaggtttcaggtacacctaactttcctcgccagatacatgaacatggaagctaaacaattggtgccaatcatacagacagtgccccccacacctttaataaccagtaagtaactatgtaatttattattaaacgggtgtcatttaccaagttatattttaccttcaagagtctggacatacgagtacgaggaacgatacccggtggaggatgaaaggtattgtacagtatggtcaagacaaagtcaattcaatgtggtccatgtggcggattcatggttttacaatgtccatgaatagcattgctgttttctctcaagggtaaaaaatgattatttttgtaatttgtcgctggtaaactgaaacaaataaaggaatgaaaattcgatcaaaattaaaaataaattaccaccattgaatcacgaaacttaggtataataggtaaaataatagtagtaacattccatcggatacctcttaatccctgagcatcctctcccacccacttggtgtcgcatcctttctttccaccttccactttccccccttccctcccctctgtctcccttcccctttctttagctacaggatagatctttgtacgccgattgagattcgctggtcattgacctgcttccaccagcgacaattcacattgttctgttctcttcacttctctatccatagatcaccgcggggaagatcgtttttaacgtctcgtgcccatctgcgctcggccagtttttttcttttttgtctctttatttttcttttctattttcgccaatctgctggccagatcatctaacttttatctccaattcgtttatacctctcttccgttcatctgatcctatcacttactactatactcagtcacaatgaacgtcaacaggaagttcgatcgcttcaagcaatgggcgggggaaagaatgggcggtgagatcaaaactaatctctcggatgatttcaaagccatggagacagaaatgtccgtgcggaacgaaggtgagtccgtcgatatataccaaaactgaaaagattcgttcaatgactgacttttcgtcaaggtctcgatcgccttcacaagtccatggttgcctacgtcaaagccgtctcgaagcgcagcgaaggtgatgacaaagagaagacattaccaattggtcatttgggcactagcatggtcagccatggcgaggactatgacgcccattctgactacggtcgttgcctgacaagtacgttatcgctcgtgaccctcctcgatctcccaggaatccacgtgtctgacaattccattctctattgcacagaattcggacggacagaggagcgcattgctcgccttcaggagtcgtatatcgcagaggcgaactcaagctggcttgagtccctggatcggtccttggcacaaatgaagcagtaccaggtaaattcatcacattaaccagatatcgctgcaacatgcctaatggaatatatagaatgcccgtaggaaactcgacagccggcggttagcttttgacacttcgttgtccaaaatgcagaaagcaaagaaggaggattttcgcgcagaggaagaacttcggacccagaaggctaaatatgaggaggccaacgatgatgtataccgccggatgcaggacatcaaagaaggtgaagtagagagtattgcggatttggaagcgtttttggaagcgcaattgaactaccacgagaagtgcagagaagtgcttctccaactcaagaatgattggcctagccggtgagtaactgttgacgcaaggaaacgcctttcacaagtatattaattattccgtgacaggcaatctcagacacaaagttcaagtggtcggcgccctggtcgtgcccgtgctagcacagcccattcgtaccaggagcgctacgaacccttgcacgaggaacttagcaactcggcagaactgcgccctatcattcggacaagcaggtctccgtccgatgtgggggactcgagagaagtctatgtcccggagcctgtaccgcagagaccattcctcggtaggacttccacgttcgaaagcccagcacaattacgacaggaacaaacgtatagctcaagtcctcgaccatctcgagcgcctagcgagaattttattacgggcaggaacagcgtcctggctcggatggccgccgatccttcggaggatgccagcccgcgatctggcactagccccgatagattgtaccaggggcggtctgattccccggtgtcgcctttcggaggtgtcacgagaagaagtagttcgacgacattgaacggggctgcgatacagaagaaagcacctccaccccctccaccttcgcgcgcgaagaagccgccgccaccaccaccgcctatgaaaaaacctatactcaatgctggtgaggcatagggtcccctcacagtaatcatcacagggttttctggggggttacggtggatagattgcaataggttgtcatggcattttcatcttgcgatgcttttgagatcatggctattatccactttccagcggtgagtggcagtagatgatcagtttgctactgatgataatcattggcatgtagtagtatgcggcagcatttgtatttatagttgtgcaaagatgctctcaataaacctttgtttaagctctagataaactatatcgtctattattttatgaatagtttaaacgtacaatttgtattgtcggcgccaactgtgtcgaggctttggtatgtagatttaagaaggtgaagatatgatgtaaaatctgggaactcgtgggatttgcttgaggagtgatatatatatctcagtcgatctcattatccgttcaccccaaggaccacacaacccagcttgcactgaattcctctggataaccgggttgtctacaagtctggtgctcaccaacaaacccgcttggtggccagtcgttcgaggttctgtgacaatctgggcctcgacagactgaatgaacttcaagctaggaactatgctttgcatgcatcgttgagttaggtgacagtgtagatgattcggtcaactgccattatcgattatagccattcggttcacttggtaatggactgtagtagatctcacgtttggtttggtatagagagaaattgaatggaagtctcattttatatataatacgcgttacgcccgcagcttgagtacactgaaagtgagcaagaaacccattaagctgatactccaatagacgaacgtattgcatgaataactcgccatattctcgcctagaaatgcttgatatcttgttgtactgatacctaagccatctctgatactacgatacgatgcccgtgttagtacctgtgatggactagtccaaaccaaggatagctgaagctcaaaccagtaactaaccggcgccttcctatttgcctcattcaaagcccgaacacgaccgtcgggacggatgagtcagcactacatcacgtgcaggcggcacgaaatcttcttccaacgtctcgccgcctacctctcctcgttacagccaaaggctgagcacagccagtttccccgaccagcacggaaagtcgcgaaagccccgtcccctccatctccatttcatccatacaggccttccacgcgcccttttcagcgcgacccctccatttggggtctccatcacccatttagcatcgcgttgggccaccccccttcccttattactggttctttccgatcggtcgcctaccgccctgtatcttcccaccccaaaacatcacgaaacttgtcgccaaggtctagatacaggccgctatcagtcgcatccatcgatacaaggcgcccgccgctcctccacgtctgcaaattggcgcgctttctcgccctatagctacgaattatcgttcactcttaccaccttcgttttccacgtgttaccttagctgcttggtcgcggatcttgtcgcatctaggtcaacccaacttgtttactccgtctatgaacagtaaaactacgcgctaaatcatggcttccctccagtcagcaccaaacatggcgactgggaacatgagcttgccgccaaatttgacgcagcagcatattcaagaggttttccaggtacgtcgccttgtcaattttttcgcactgggcgcctaccccctactaattgttttgttcttttctttcctcacccttaccaattatctttggcaatgtctacttcaattgatttctctgacagtcgcatagaagtacaagcagatgcaagagcaaggtgtccgccatgatgaccccgagttcctgaaagcccagcaccttctttcggccgttcagcgacagcagtttttccagaagcaaagacaagttgcacagcagcagctccaggcgcaacagcgtcaacaaatgaacggtgccggcccagactctgctgccaccaatggtctcaatcgtaagcctaccgctctaaacctttctccgtgcaccggctagaatccttatctaacctagtcattggcaatccaggtcgaacgaactcagtgtcttctggtaccggtgccattcaggatggcacttccacccaagcaggtagtcagcagcaagccctagggcagtctgcctctcagaagggagcgcctgttgctagtggtagtttttcggctgagcagctggctacgcttagaaatcagattgtcgctttcaagtggctgtcaaagaatctctcaatcccacctcgtgttcaggaacaactgttcgcatctaagaaacagcaaacaccggcgccctcagacagtgtgacggcagcagagaacatcctggaaagtgtatcccaaaacaagactgaacagcctgctattacgacagagacttcacctcaatctaaagatttctatgaaacatttcaatcgccctatgattcagttcccaaaaccatcagcttttccgaccacgcttcccgcgcatatcgtacgcgcatccctgccttaatgccacccggtattgatctggaacaggtgcgcgaggaaagagagttggttctgtataataagattaacgccaggaaagcggaattggctgagctgcctgctaatataggcgtatgggatacaagccggagcgataccgcaacaggcgatgactcgttgaagttgaaggccctcattgaatacaaaatgctcaatctccttcctaagcaacggatgttccgaaagcaaatacagaacgagatgtttcacttcgataatctaggaatgactgcgaaccgttctaaccatcgccgtatgaagaagcagtcattgcgtgaggctagaattaccgagaagttggagaaacaacagcgtgatgctcgtgagaccagggagaagaggaagcaatacgatcaactccaagccatccttaaccatggcgccgagcttcagaatgctgcaaaccaacagcgcactcgtatgcagaaattgggtcgtatgatgcttcaacaccaccagcacatggagcgtgaagagcagaagcgtgtcgagcgcactgccaagcagcgtctccaggctcttaaggctaacgatgaggagacctacttgaaactcttgggacaagctaaagattcacgtatctctcatctgctcaaacagaccgacaacttccttaaacagcttgccgcttcggttagagaacaacaacgtagcctggccgaacgatatggcgaggatgatcagttctacgacgaagaagaagaagaggaagaagatgttggatccggaactgacgacgaaactggcggaagacgcaagattgattactatgctgtcgcccatagaattaaagaagctgtccttgagcagcctactatcctcgttggcggcacgctcaaggagtaccagatgaagggtctgcaatggatgatttcactttataacaacaacctcaatggtattttggcagacgagatgggtctaggaaagaccattcagaccattagtttgatcacctacatcattgagaagaagaagaacaatggcccgttccttgtcattgtacctctcagtaccctcaccaattggaacttggagtttgagaaatgggccccgtctgttgcgagagttgtttacaagggtcccccgaacgcgcgtaagcaacagcagcagcagattcgctggggaaatttccaggttttattgactacctacgaatacattatcaaagatcgaccgattttgagcaaggtcaagtggaaccacatgatcgttgatgagggccaccgcatgaaaaacacgcagtcgaagctgagcagtactctatcacaatactacaccagccgctatcgtttgattctgaccggtacccccttgcaaaacaatttaccagaattgtgggcacttctgaatttcgttttgccgaacatcttcaaatctgtgaaatcgttcgatgagtggttcaatactccattcgccaacactggaggccaggatcgaatggagctgtccgaagaagaacagttgctggtcatccgccgcctgcacaaggttcttcgtcccttcttgctccggcgtctcaagaaggatgtcgagaaagatctaccagataagcaagaaagggttatcaagtgccgattctctgccttgcaggccaagctgtacaagcagcttgtgacgcataacaaaatggctgttagcgatggaaagggaggaaagactggcatgcgcggtctgagcaacatgttgatgcagctgagaaaactttgcaaccatcctttcgtctttgagcctgtagaggatcaaatgaaccctgggcgaggaaccaacgatctactttggcgtacgtcaggtaaattcgaactactggacagaatcctgcccaagttccgggccactggtcaccgcgtcttgatgttcttccagatgactcagatcatgaacatcatggaggatttcttgcgccttcgtggaatgaagtatctccgtcttgacggttccactaagtctgacgatcgctccgatctcctgaaacttttcaacgctgagaattcggagtacttctgcttcttgctctccacacgtgcgggtggtctcggtcttaaccttcagtctgcagacactgtcattatcttcgattccgattggaacccccaccaagatctgcaagctcaagaccgtgcgcatcgtattggtcaaaagaatgaagttcgtatccttcgtttgataagctccaattccgttgaagagaagattcttgaacgtgcgcagttcaagctcgacatggatggcaaggtcattcaggcaggaaagttcgacaacaagtctactaatgaagaacgagaagccttgctacggacactcctcgaaaccgccgaggccgctgatcagatcaatgaacaggaggaaatggatgatgatgacttgaatgatatcatggcaaggtctgatgaagagctgcttgtattccagcgcctcgacaaggaaagaccaacaagagacccttacggacccggccacccgctgccacgtttgatgtgcgaggaagaacttcctgacatttatgtctctgaggagaaccctgttacggaagaagttgaggttgagatggctggtcgtggtgcacgtgagcgcaaggttactcggtacgacgatggtctcactgaagagcaatggcttatggccgtggatgccgacgatgacacaatcgaagatgctatcgctagaaaggaggctagagttgagcgtcgccgggtcaacaaggagcgacgtcaacggaaggtggttggtgactcttcacctgagccgtctcgtgaaagctctgaaacaccacagcctaagaagcggggtcgcagaggccctgcgccgaaacgcaaggcagaagagcttgtggaagagacgcctcagccgaaacgtaagaggggtaggcaggctaagcctgtggagaccttgagcccagaggatcgcgctatactccaacgcatactcaatagtacatatcaagcgttgatggacatggagcaggagttacccgccgattcctcggatagtgaagatggaccagttacgcggtctataatcgagccattcatgaagccccctccgaagtcgcaatacccagactactacatgatcatccagagtccgattgctatggaaaagatccgaaagaagattaaccgtgacgaataccaaaacttgaaggacttcaggaatgatatccatctcctctgtcaaaatgctcgaacctataatgaagatggcagcatcctgttccaagatgcgaatgatattgaggtaggtcgccgcgttgatgagtcatgtgagtggactagtactgacactgagtaggcaaaatgcctgagtgaactgaagagagagaccgagggctacccgcaatttgccaactatgacgaccagggagcgcctgttggtcaagatcagtctctcgcggcaacccccagcgtcgagactcctagcactgtcaccacccccggccaaccgaaactaaagcttacattcaacagtggtaatcgggacagtacaggagccgccaacggaaccccacagactggaataactgaggagtaatctttgcataaaccttcgtcctggcttgcttgactctgttcattaagtacaggggagagacatttccccctcacaacgcattttgctattttgatcttttcttgacatgtacccatccggctttggacggcgttatgtgacttggtgatggatgatggttgatggcgcatgctctgctctactgaagacgagcgattgatttcatttatggttttcttttcgtttattctttcacatttaaccccgccttctccagtgtattcagtggtcgataaactgatcagatacagattttgtcttctcactttttgttgtctatttattacctttgcctgtcgtgccgggatgctatcgccttcccatcactagagagacttgacttaccctttcaatttttgtctcagatgatgatgagatcggctgtaattggattctttttttctttcacttttcatgtttgtgttttatcctacctgagaccatggtagtcgtacatctacatatagttgtactaatgggcaattgaatgtaccttactgagatgaaaagagcgcgcaaaatgtaaaatggatcttagcaagtgattctttacttggttaatactatgtagtatataccagccccgaccgacatcgggagtggccaaccctaaatcttagagtggcacagccatgcattagccccgtctataaacagttacattggcatccgccccccttccaacaatgacttcggttcccgagccctcgtctaaattgctgccctctcgaacactataacaatgcatgatagaaaaacaaaagcatccaggtcaagaacagggtgccagacttgcaagttggtttcccctccccccaaccaaagagggtctttgttcgttacatcaacgttcatacgccactgaccgtaccccaggatacggcatgtcaagtgcggcgaggagaaaccggagtgcttccagtgtaagaactctggccggaaatgtgatggttacaaaacttcctctcagtaccaactacccacgaaagtagtacatcgtcactcgcgacccgcctggtcaatggtgagccctgaccatcgcctaatcctccgtccgggaacgagggaagagcgacagtatgtagatttgttctgctcgcagacgtcacgggctctttctggcttcttcagccctcagctatggaatttccaattaccgcagctcagccagtcggaaccgactattagacatgctatcgctgcactcagcgctgcccatgaacgggccatcttgaatccatcagcagaaaacgcgggtgttagggagcaattcgtactccagcagtataacaaatccattcaatatctaatggggcatctcgccgtgccaaagtcccagtcggttgacttgttgctgatcacatgtggtttatttgtgtgcctagaaattgtgcgagggaacaataaacaggcgttgaaccacctggcagcaggggcgaccattctccacaaacggggtcatcttgcaaatacaacttctcagtccatggatattgacagggagctatcccacttattctttcggttaaatatgcaactatctctctttggacgcccactagcccccctcactattggacataaaggcgcactgcctcctacagagggaaagatctcgttcagcaccattgaagaagccagacactgcctggacgggctaatgaataaagccctgagattcgtgcgtctaagtcttcaggtctcgacaccaggtcatgctacaagactacaacagagacagaaacaacaagatataaaggaggagttcgatgcttggacaatggcactaaacaagatgatggcgcggagggggaactccaaaacgttggacaagcgtggaccccttacactccgactccatcatcaagtctcgctgatatggctgcgagcttgtttcgcaacggatcagatggtcttcgacaacttccgttcagattttgagacaatcgttcgtcttgcggaggaagtaattcgcctgggccctgatcaagaaaagccgtctcccgcgaatggattctccctcgaatctggaattactgccccattgtggttcacagcggtaaagtgtcgtgatcccatcattcgacgaaaagctatacggattttgtcagattatcgtagaagggagggaatgtgggacatggggctcttcttcaaagtagcagaattggtcctggaatctgaagaggccgagctatcctctctgcccattgagaaaagaatacccgaagaccggcaacgcatatatgacccaatattacctgaggaaattgtggcgagtccgtgtcaggttatactgttgtcgagacccgatggggtggacgggggttggcacacacggacagcatacattaattggacctcatagaaaggagtgaatcctacttgacaacaggcgattaaactagacgcagcacaaggcgcttagcgatatataccgagtaccgcatgctcattataccaagcactaactaagcatcaccgaattgtagggctgtaaacttcgaagcggaattcttttccgtaccgtcaattcccagttctcacacagatatcatcgcaagggaatggaccctttagtcagtcgtgtgtgacttggatggccgcagatggcatcgtttacaggaacgttagtgtggacttttgtctttgaagttgatgatacagatacagtggctgcccatgtttccgagggcgggtgtctcctcccagattttgagtttgcgctcgatgaatgtaggagatttgagtttccttgggatatgctcagtcatgcgtgtacagtgtacgcttccatccagagtggatcgtgtatacgttccatccataaatcagtgcagatgaaggatggcaccagcaaggcactgcagtagttcaaagttataaggagtagtaactggaacattctatatgtttatgacccgttagggctttccgtaatatcccttatctcgcggctgaaggcaacagcctgaggctgtcgggattagtcatcgcgaatgcacagtgtgacaagacaatacaggtacagtaccgagggtgtaacaccatcaccatggcaaattgcgtactaatgtttctgagaaacccctttagacgcaggtgcaaatgtgcagtcttcggcattagcatagccttacatgtgcgcaactgctaagatcgacgagcaaagatgaaaccctagtggcttagccaggtcacgtcatccgtgtatcggaagaacgcctctagtgtgctcgacgtcatgaccaatcacgtgacacatcgcaccgtcgtcatggcggtcattgcgctccgtaaccgccagatcgtccttccgaagtctcacttcctcagcttgataacgacccgtcttttctcttcttcaacattttcgtcagcctccatccagccccgacagttagcctcaatcgataaataagtccagctctttcaaaaaaagcaataatggctactttccaggatcgtgctcagcacgctattgctcagcttgacaaggaggtgagtccttgtttgtgcgtgttgatattcgtatgaaagaaatgcgttggcattgattgcttgtgtcgggggcgataacgatgattctctgttgcttttttgacttcggacttcttcaaacacatttatttggtggaactggcggcaattgaccgttgcttgtctttttgttttcctgttttattttccctttgtattcggatcgaggaaggctaatcaaaacatttcttgtgtgtttcgtcccacagctttccaagtaccctgtcctcaacaaccttgagcgtcaaacctccgtccccaaggtctacgtgatccttggtctggtcggtgtttacaccttcctggttttcttcaacattgccggtgaattccttgttaacctggccggcttcatcatccctggctactactctctcaacgcattgttcaccgctggcaaggccgatgacacacaggtacgtcttacttctcatctgaccttggacgctgatcgaatatgctgactcttcctgtagtggttgacggtatgttcttgtgatcttgttttccctctgatctataccgctttttccgtaggccgtgctccgagcacgtgataggtttccttgtatgaatcggcatgactgattgacatgtgaatcggatagtactgggttgtttacgccttcttcgccgtcgttgagagtgctgtctatgctccttactggttccgtgagtagtccctttttgttcttcggttacagtggcttttgcaattgctggaaacaatgtgctgatctccaatttaactagccttctactatatcttcaagttcggcctcgttctctggatggctcttccccagaccaagtaagctttctttttctgtttttctaggaacacgatcatgaacatgtgctgacccaattttccagcggtgcccaagtcgtcttccactctttcattcagcccgtctttggccgcttcttcgctggcggaaacacctcggccaacctccgcgcccaggctgatgctgctaccaaggcccagtaaatagactgtacaaggtgagatggcattcgcggtgtgtcctgcgttgccatgagccaggtcggtctcagtgttttggtacttgaaaataaagaaaccagtgaagattcgctggcgaggaaaaaagtgtcaggtgagaagacacttcgacctgagtcagacggttttgggtcattctagctgtcttggtattttgtcatgattagtagaattgctttgttttgcgcggtgggtgagacgcggggaaccacgccctctttccacgaacgcgggtatagttgtatttgatgcgatgatgccactttgttaatctgaagcaccatttgatttgtttcaattccgggtccttttccgcaggattggttagcatccgtgcttgttgaacctcgaacagtaaagtgatatgagccagtggaacgtaataatacacgggaagataggctgcagaaaagccccagtatcggagtaacatcgaaccgttactccacaactccagatgtacagatatggatgcaagctgcatgtatctttggagcgtgagaaaaagagaaaagaggggtggaaacaggtaatgtgacccagcgaaaccttacagatgtaatggtttcttatatatcagtatagtccaaaccgattctgccagccatctgaccgggggtttaggacaatcctataagggaatgggttggaatcacttgtcgtgatgggcggaatatgatccttttctcggttgactacggcgagaatctttaaggctgctttttgaagcatattctccatcgccttgcgcactttggcgcgctctgcatgagcagtcagcactgacatgtatttgtacaagctgcagagtgcatgtatgggccgatattaaggtgccaaatgcatacctgattctgtccgcggagtggcaatcgtcacatccagattccacacctcccaacatacttcttcctcgccttttccagcaagtccaccgaaccagattccggagcgtctgcgcttcttctcgtagaactctactgcgatccgaccgcgcacaccgccgcccccttcatgggcgctagcagctgatgaggagtgctgtcggactagggcgctgatacgtgactcaatcagagtttcgaggtcttcatcgttaatagcggggagagtaaagtctaggacatcaaaggtagtcggtcggatagaggggaaataacggtgaaagaagattaggttgagaacacctaaaggagaagatgtgtcagtcacagataccaggagaactattaacgaacaacatgccagatcgaataaatgttctaatagaataatatacctttcaagacgtcccggacggtagtggtgtctgcaaagatctccaggaagtactctggaggggttttgcggggctccataacgtaacgcgttcgtgttggggatgcaagagatggatctgaaacgaacggtggggatcccgttctccttttgctgctctatgattttgtgatagcgagtttctgacgacgacccagctaccacagcgagctgggccgtgaaaacggagcgatgtcaccgttttctcacggggattcgagcagtcgaggagtggcggaaagatgacgatgtcggatgctgagggcgtaacgacgtaagggatgcggactagattgttgtatgagatacttaactgcgatattcacggaggatgcatgattctctaggaatatttcaggtatgtcaaccagcagaggagtaggatatgaatatgtagaccaccgaagagttgggagagaatgaaccagtggatcaggagtgagacggtgaccattccggcggaggagttgcccctcgccgattgtgacggaaagataacggtgccttaactcttttggagtacctgagcgttactcaatttgaccctacctacggagtacaatgaacttgtttaaaaatggaaaatagaattatacaataatcgtagatgaagcagctcaaggactatggattatgtacatggacttatttatttatgtatattaaattgtattgacgctctattttaacaagaaaccaagactcttctccaatttaatacgtccccgacaatcagagcaccaccccatgatttcacgttgctatcgaactttagccgaggccgcgccagacggttggccatgattttatcattccccgaccgtctcgctcggctgttgtcattgatgatcggtccttcttcacctcctctccccttttatattccctggcattagcttgcctctgctttgccattcctcttctttatactttatgatgagctgaattgattcatatccttgagagagattatccgcttacctccgaccgctccaccatgatcggtgctactaggcgctggttccggcgcaatcgcaagggtctcgcgatcggggctggcatgatcggagccggttacctcgcaggacaatatgtgctctccaaaatttcagaagcacgggaacgtatgagcagtgaccgaatcgctcgggagaagtgagtaacctccctttgcttgtcgggtgtattcgtgtgctcggagacggtaattgacctatcattctccaatgttgcaatcttcagtttacggcgacgtttcgaacaaaaccaaaccgattgcacctataccgttctcgctctcttaccgactgctgcagaagatattctggacgctcttcctgtcgaggaattgacgaaagagctacaacgaaagcgagcagagaggttagctcggctcaacgccggggaagggaccggatcagatctaagctctgtatcgcccagcttaccggaggatgaccgtcggagtctatctagttttcagagcgatggattcgtccgcacaagccaaccgggagaacctttcgttgagggcgatggcgaggcgcgaccgaaacgcaataagacacagctttggaatgaagtcaaaatcacttgtaagacatctatcccaaacatattatctcccggaaaccgaaactcataggcttgtcacagctatcaccaggtccttcactctagtctataccctttctctgttgacaatctttacacgaatccaactcaaccttctcggccgtcggaactatctttccagcgtaatctctatggcgaccccccctgccaacgaatcgacgatcaggctggaagaccatgacgatgatgacctcacacagactttgggaaatgattttgagaccaatcgtcgctatcttgcctttagttggtggttgctccaccgaggctggaagcagttaatgaacgaggtacagactgccgttacagaggtctttggcccccttaaccctcgagaggatatctcgttggccaggttgtccgagctattcctggaggtccgaaagagagtggaagggtatactgaagaggaaagaaagtatgtttcttcttacccccatagccaaccgaactttttactaaccgttcctgcagacacaggaagtggctgtcttatctgctccctcctcgcgaagaggaggacaaagtactagaggagtctggtgtccttggagtgacggagcttgccaactcccaaactgcagctacgttgcgacatctattggatgagacggctgacctgatcgaatcaccaacctttacgcgcgtcttgatgcttctgaacaacgaatgcttccagacattaatccatcaatgcaccgccgatgccttcaagtcgacgtcacaaactccacggagcgttccccagtcatttacttcagttgccacggttgtcccgggagctgatagctctgagccaaaggcaaagttagccaacattctggcggttttagcccgccaagcacatgtgattggcaatggtacaaacccgccaaatctttatctaactgcgatggaccaaggtgtgcgagagttggaagccttcgcagctgtggtgtatagctctaactttgatttcgagctgattgggtctggaacgaagatggagtctccgggagaggagacgcctggctcggacacggtgttggtcgagaaggaagactatgatggatatgaccgcaatcaggctcaacagccgtcgacggcagggcctggtgcggattcggcatttgagaaggcgtgggggaaagcaatggaagagcagccatcgactgctacgtaaccaggcaggcattttctttccggcagcggcggacattatcaatccgcagtgcttcttctcggacttggataattctgggagatgtagttcttgtatgatattttccgtgcatttccatgaaagcatagctttctatgacggcggtgttcaccacggttatagttttagagatgcttctatcgacttcagtggcacccacattatggtagaacgggcatgtcacatatacaaatgacttatggattctattgttagaaagaaaacaccctcaaactagtacggacttaagagcgagctgcagcagacgatatcatccttaaaggaagacaattttcgctctatggcggacttacagccgcgagagtttaaactattgtaaacgaagggtaacaagtttagactttccatcggtaacaaacgggttgctccggagtatgcctgtgtttatttatatgatgccaataaatgccgaacactcacccactccactgatgttctagtccctttgattactgatgctagtgtgggggaggtcgtttatgtaatcgtctccagactccagcagacctttacttagtttactagttcagttgcggggaaggtagcttagtctagtgtcttcagcaaggcaatacgtatggggtcacgaataacattggggcttggtcacctcgatctccagtgatataatgggtgattaaggaaaaaaagaagaacaaccttaaattacttcgtaccatgtggttgacatgcatattcaattcagcgcggagaccggggttcgcaaaatggccaggctataatggacccccggagttaaagtggcatgtcatggatggagttaagctccccaggctgcaaaaatcttatccagccaatctcaattgaccatacttagtcgggttcgcagggtagtagtagttaggtactcatgaccaccgagtgactcgtacccatgatccttccgagcacaagagctgtattatgcggaccgaatgatttggcaataaacttcctagatcttctaccgtatttctgtctttctcttctttgtggtttatgttctcgattctttctcttacagttcaattagtcccagtgtactgcgagtggtgaatacaaagtcatcccttcgttcactttgtgtcagcccgctctatcccccgaaggtaagcgaaaacaaccatcctatctgttctttcctagagcaaacaactcggagagagaattcgcaataaacggttactcaagagtactagaaatacatacatcatggggttcgacggtatggcgagcaaaacaccttaccatgagcatgatgctgagacttacaaatcgcgcgaccagagcaactcactccgcaggatgacaagattgagggccatgtcgattcgcaatcgaccgaccttccccagctgaggaataccacagaacgcaagcttatggctaaaatcgattggcacattatgccctgtctctgtgttatgtatcttctcgcattcttggatcggtatgagtctgactggctttctctatgagcaactactgaatagttatcttacattaccctttgtgaacagcgtgaatatcagtaacgcagcagtccttggcctacaagaagacttgaatatagtcgacgggacgaactacaatactgcactgactatattcttcgttccatatatcattttcgaaattccatccaatatcctgcttaagaagttgagaccccacgtatggtgtaggtattcccgatataccgtgtataggaggtatgaactgaaaggccggtggctactctagtgacgggatgtatgtttctattcggtctggttacaatctgtcaaggcctagtctccaattggggcgggctgatgacaactcggtggtttctgggtaagtcgacaaccctctagccagtgtaacatttatcaactgacaaatcctatccaggaatgtttgagacaggcatgttccctggttgtacgttctgttatttcccttatccccgctcgatataacgatgaccaacagtcgtatgcaggtttctatctcttgggaatgtggtataaacggagcgaggcacagaagaggttcagtttcttctttagttcaaccacacttgcgggcgccttcggtggcttgctggctagcgggcttggaaagatggatggtactcgtggctaccgaggctggcgctgggtctttatcatcgaaggcctgatcacttgtgtcgtctcgcttgcctggttctttattattcctgatttccccgaagacgtcaaatggctcaccgatgaagagcgccaattcatccgggcaaaactagccagagactcggggagcgcgggtcatgatgctaagataggctggcgcgacgtattggaggtcttcaaagactgtgagtgacatggtgagcatgccaaaatcgttgcggtgctcactgtgtattccagacaaaatattcatcggtggtttgatgtacttcggtcaggttgtcacagcatatggtaggacggatgcacatgcttctaacgtgtatctcaactgatgaggagcacggtggctaacaacgcgtaggatatgcctacttcgcgccgaccattatcaagagttatggctacgatggtacgtctgtctgctatttcttgtgcaccttgcactctactaagcctgatttctagcaatcaagactcagctgtattcgattccaccatgggcagccgcttggggattttccatgctggtggccattctctctgatagaaccaggcatcggtttgcttttactatagggcctatgctaattgccatggctggctttggaatcttgttgaatgtacacgggcaggctcgtcgaaatattcagtacggcgctttattcatggttacatgtggttgttacagtgcaatgccggtcattgtttgctggtttgcaatgaacctagcaggccatcgtaggcgaagtgtgggaacggcctggcaagttggatttggaaatagtgagtggattttggtgatttaatcctatttatcgtagctaatatagcggcagttggtggtatcatctcgacgtacgccttcttaaaaaaagatgcaccggaataccgaccaggatatatcatcagcgtgtccttccttagcttttcggcggcctgttgcataggctacttcgcggccgtctggtatgacaaccggcgccgtgatcaggcaatcgcagatggcatggccatacccagtgacgaagaacaagagctacgcggtgatatggcgttaaactatcgctatagctattagccttgttctttgatcgttgaatctgaaagagatgttgagatgtctcttagcgagtgacaggatcgatgcaaggctacgtcaggcacatatacagcagagacaaatgggtcaatgatgaatatgtgatcttcgtctattctccctaaagagcaatgaaattttttcttcataattttacaatcacagatcacatttaaaagtggatatgcagtagagagaaaatgaactccatagatagtagatgacataatgccctctcggtaagccgatgtccagccaatcaacggtaggacagcactagcgaacccttagcgtcatgggacgctgagtcagccacgacgcacacaagaagctcggccggccgctgctctccgtctttctttcaaccatctcctcatcctcgcagaagtgtgagtatacagaccgggctggcacctggttgcctctttcattgaatatcaactaacgcttcacagtctcgaaccctctacgaagatgagagctaagtggagaaagaagcgcgttcgtcgtttgaagcgtaagcgcagaaagatgcgtgctcgcaggtgagttatctgagagctcagccctgctggacaattggactaacaacaagcgcagcaaataaatgactcgcccaatccatctcagttccccatgcggtgctcacgttgaatgctgaacatgacaaaagtcgacgacgtcacgatgatgattccctattatgatcgtttcgtggtttagccactccaacgggacttggctggtctgctattctctatatcctatcgaatccggagtcttatcattcaacgaaaacatacatccaatctcgcgggctctttcaacggtttcggattttgaccaggcaggaatgcgcactacgtattcttcgtctcggagggcgaatgtgtttggtggggtttggaggggtcgtggaagaagttgatggtcacgtttcttatgtactatttgttttcattccacaggccctttgggttccgtatgggatctggtcaatcactcttcttagggcttgtgctgtagcttacagttcctgtgcaagttctgagccatggagaggtcatcgaggatttatcacaaattaaaaagtttgcaatgaaagcaatgactgaaaaccgcctggatgtataagatgaaagcattcacgtagagcacctttgcgagtactcgcattgtaaattgatatgcaaattgtacttatcagtggatttgtgcgtttgatatgatccaatgctttcttctccgccttgagtgcggagactaattctgcccctatttcccgcccagcaattttttttttacttgagcttcttgatctataattgactgaagcttactccacgcaaaagtcgacttcattcgctcccattcaggctcaattttgagtacaacgccatgccttctgacaaggtggaaaagaagcgcaagcgcgcttcgaacggccacgaacggccgagtaaaaagcccgccctcgaatttcaagatctacctcctctcgcggccagcgtggtcaacgatgatagtgaattggctccagtgatcagtatgtactctttaactgctggactatactcgcaatcagcgtgtacagaaaattgatcgcccctctagtaaccacccccggtgtgaacgtgccccaaaaccttcatttaaaaccatacctcaaggaccgagcagatggctctttatcaggtcgctccacacggaacaagggcattgtctcgtccgaactactcctgcagacttcggagcatccaaagatggatttcgtgggtcgcgaggccgaagacgacgccgattcgcagttaaagcattacatcgccgttgtggatcccgaaaagaaaagctggcagtttgttgaggtgcggaaggtgactcttcgtggagcagtgaggagaacaaaggctgctgcagatgaagaggaggaggttgagagtgaagatgaggagatggtaggctcttgtttctttgaccggtgggggcataggttactgacagctcctaacagaaaacgatgcgcgctcaacgcacagaactcaccaatacattcggtactaagcagtcccgcaaagcagcgcagtccatggccgaaaatgcccaactctccaatgcccccgctggtgctgcctccgccgcagaatctgctattctttcgtccatgcccctcgactccgccaccgacattgctacgaagaccgctgcggtgcaggctcaagttcaagctaacaaaccactgcctcaagccaatctggcagcgtctcatccttccgatgtgtatccgattgatgtgcttgttccgggaggtctgtccaccctccagcagctcccgggcacgaacgagtggcaggagaccgtgaactccggagaagccgtcgccaccacctcacgatatgtgtctcgccgggtggaagcagtcgtcaactcaactaatgccacccagcttcaagttctgcgttttatcttcctcctcctcgagcttgcccgcgccctccgctcgggcaaggactccaaatcgtccgggccaggtagcaaacgtcttccacctcgcgatgaacttcgccgcatcctctcctcccccactggcgccaaaaccgactcagccgaaaccctcccagatcccgtcatcgacgccatccgccgcaaatttgccccgcagggcacccatatcaccaagaacgatatcaccttcctgcacaccaccatatgcgccctatcgctgcacattccccctcagccagccaaagacggcggctccagctctctaggtggaaacgcccccaacgaactagcaactgacccgtcggatctgcgcgacgatctgcgtttggataacacggtcatcacgcaatatttccgcgagttgggttgtcgcgttgacaagccacgcgaaacggaattcgccaaatggggtattaagggtggtaaggccgaagccaatgctagacgtgtggctagattgagggtccccgtcgagttccccaaggttagccgtggtggaaagaggtaatttaatggccattgcctctttctttcctattgaacaaaacaaaagaatctatttgcgttgaacttgcccatgatgcgattggcgttcggtttcaggttgtactatatgtacatactattttgtggataaatataaaattacgaactatccaaggtacctcttctacctgctctttcagtggattaatgtttgcatacgggtaccgtagacgattttttgtagaaagccatgcacaccttaacataacccaaagtcccttaggtcaaaaaagtaagatgaaaaaggcagaagagaaatgaaacaatagaatgaagggatctatatcaataacgccctctagaagtaaatatataaacaactgccccaccctagtctaagcaatgtgtgatcaaagcccaaacagtaaacaattagttggaagacacagatgttcgtcttcctttgttttttttttaaaaaaaaaaatatatcttgttattttcacaccgtcctatccaacgttggacgatctaaactctatatagacagaggcttccacatatgctaactgccttaccatgattctaccctatatactaccggtataccatatgatactagcattataattaacctaatctaatagtaaccccatgcttcctttttcaatggtgagggccgtacccgttcgacggacctacttgattggtgtgtcttgtctttgtgctaacgatatatatatgctttttgaatatcaatcgaatgacgtatgaaatatctatactgtatcatgcaaaataattgaatacataaacaaactgatcatcaaggcatagtattaatagcgacaacaagggctagagtaacatggagcaggtaccaagaatatggtgggtgaggtatcagtaaaatgaatcaattaacccttagaaagtgaatggatctcggatctactacaatcgcaattacattacaagttaatggtcaaaactggctcctactgatcttcgagaagaactgtctgaagagcagaatgatacctctgaattatgtttggaagtagctatccatatcatgaattggccctggcatcttgtgactatatgaatgatgcctttattcaatacctcccagtgtaggtaggtgtcccacttaccaaacgtagatcatgatcttagttattttcagggataaacagaggtcggaatcgattaatgcgacttgatgtatgtagcctgaggttcggatattgatcggaggtaggtgatctttggtactgcgtgtatggccccttctattgttattaggaaattggtgaaggttagttaactgctatattgactacaattactgggcagtgtatttgaagccctgcggttacggaggagatgaagtggcatgggggcagacaacatgtcagatttcgagtcgaaccgaaacacatggtaacgactgactggttctaactaatagtccaaataccaattacgtccaacaagggacaaaggagtggatgtggaatttataacatagtgtgtgttagtgtgtgtgtgtgtgtgtgtgtgtgtgtgtgtgtgtgtgtgtgtgtgtgtgtgtgtgtgtgtgtgtgtgtgtgtgtgtgtgtgtgtgtatagaattccacgtcgatttcagctcacatgcgggcagccacttcaggcagccacacccaccgggattgacgaagcagcagccgcggcaggacgggtggcggtccgcatgggggcctcggcaaactcgcgttccacagcagcctcaatggcttcgttttccttcagccccagctgcacatcattccaaatcggctggttctcagcctcggcgccatcgacacccacgccgacgaagccgccttgcgcttcccaatcgctggtgcgtttgatgcccagttcgttccagactgtttggacggcttgcaccaggtggtcgcggtgctccttgatatgtcccggggtgggcgtgatacgaagccgctcttcaccccgaggcacggttgggtagttgatggcttgtacataaattccatgctcctccagaagcttgtccgaggccttcttagcaacctcggcatccccaaccaggagcggaatgatatgggaggggttgggaattacaggaatatccaactccttgaaagctgctttgaccgcgcgggtgtgcaactgctgcaggacgcggtcgccctggtgacgagcctggtactggatagcagtgtctgcaccagccatggtggcgggcggcaaggacgtggtgaagatgaagccaggggcgagggagcggatggtgtcaaccatcgcagcggatccagcaatgtagcccccgacacatccgtaggccttgcccagagtaccggtgataatatcgattcggtccatcacggttcccttagtactgcgcgggttgaccgtatcttgggaagcatagatgtcatagtcaaggtgctctgccacacctgctccgtgaggtccgtacattcccacagcgtggacttcatccaggaaagtaatggcaccgtacttgtctgcaagatcacagatcttctcaattggggcaatagatccgcacatgctataaactgattcgaatgcaataatcttggggacatgaagaggtagagctgccaacttggcctcaaggtcgaccagatcattatgcttgaaaaccattttcttggcgcctgaatggcgaataccctgaatcatcgatgcatgattcaggctatcggacagaataacacagtcgggcaacttgctacccagggttgcgagggtggcatcgttagccacgaagcatgagctgaagactaatgccgcctccttgccgtgcaatttggccagggtgttctccaggctcacggcatgttgattgtgacctgaaatgttgcgagtacctcccgcaccggctccgtaggtgtccaatgtcttatgcatggtggccagaacctcggggttgcggcccatgccgagataatcgttcgagcaccagaccgtcacacgttcctcggcagatgtggtgtgagcccggggaaactcctgagcgagacgattgatgttgttgaaatagcgatacgacttgtccttgtgtttcttttccaattcggtgttgtagaaagaattgtagttgaaaggcttcgccacgggagcctctggacgagggccagacgtagcggcagcggcggtagcattggcaggggtcttgatcttcgagaaaccggcgggatctcgctgggtgttcttgtagatctctgcgctcacattggcgccgttaccggaggtggagtgcagggttctcttcccagtaggagcacggcaatgcttgttgccgagaccggtgatgccggcagcacatgaggtgaatcttttggtaccggccatgcgagcgctctgcacggccagagccttgctcatgacagggcagcgacgggcaatgacctggagattagacatagtgcctccaccggaactagtgctaggtcgagtcgcggttgccagcgtacgcagagaagatggagatgtgcgcttaaggaacgggcacatcgcccgggactgctggagaagagactccatgagtgatgcttcaatggatagcgaaactgactatatcacaaaaggaagcgaagatgaaatgttgtcaagagggagagggagaaggagagggatatgtcacccgcggcgaagaggagagagaaataagagtcaatctggctgatggactgagggcgagggggcgctgagggcactaagccacttccagtaagagtaagtcggggacttcggcgagacttttcggcttaccatatcctccgccgtgattggccggcggacttaactcggcaagtgcattttcataatacaagtaatactaagaaatctctcggtgcgtacggatacgaaacttcacctatgaaatcattcataacccaagaggcctggcgacggggaatattgccctaactagatacagaccagcaggatccggatgtacagtacaacaatagtaataatagccgggtgatgaccgtcaatttcaccccccccgtcacagcccaagaacaggtacaggatacaatgtctatcttgccatcaatttcaaaactcgcacttgatttttttcttctccttctctttgccattatcggctgattaccacgggtttcatccttcgtcttcaatgactcttaaatcgcttcgtacatcaggaatcaggaatatatgctgttaatacaaggcagaacgtaagctgcccacaagtaaagtccgataaaaagaaaaacaaaaaagaggggtttaagaggaaagaaagaaagataaagggtgggaaagaaatgcaatctctgaacgccatgaccataaccagccgtgtccattattgaggcacagatcgattaaatcaactaggccctaagcctccgtcgccatcaatgagacgtaatctctccttggtagttttggctcttttagacgtgccctttcctgtcccccttccacgtcctcgtttaggaactggcgtggaggatggggtgcctaaattctctgcagtcgacacaggagtggccgctcctgatggctttgcactggcatcgtcaaagttcccttcgcctatagattgacgcggttagtactatttccagaagcctccccggaacgaagagctttgatcagattcacataccttcatgatacatatcatccagcgtgatatctctctttctcttctgagcagccttcttcccgcctttactagcgccaaacacttcgcctcggtccagcgcttccttctccttttgctcaataagctccgcctgttcatcatctgccagccacatggcgatgtccttggttcggctctcgcggttgcgagtattgaagtcaaccccaccagctgcgccacctgagatgacgacacgctgcacttcctccttctgcaaagctcgcttgcgaatacgctcctcaatggtgccgcgagtaatcaggcgatacaccgtgacctgtcttgtctggccgagacggtgagcacgatccatagcttgagagtcaatggtagggttccagtccgaatcataaaagataaccgtgtctgctgcagtcaagttgataccaagaccaccagcacgagtagacaaaaggaagacgaagatctctggacgctgctggaagtctgccaccgtgtcgcgacggtcctccaatttcgtacttccatctaggcgacaatacttataattgcggtaggtcaagtactcttccattagatcaatcatgcgtgtcatttggaagtagagtagcacacggtgaccacctgccttgagctctcgcaagagctcgtctagcttagccaatttacccgaatctgtgacgaatcgacgcatagatggcacttcaatgtgcgtgtagcgtcccttgatggatattggctgcggtaacatcggcggaagggagtaaggaatagggtccagcttcttctcaaggatctgttgctcaagttgcttagaaggcgtgctgaacaaggcatgtcgaaccgaaacattgaagaggctatcattcatttcgctcagaggtgctcgactggaagaggagacggtaatcggaggcgcagacgctgcgggactgacacaaggctcgatgatgccgagacctttacgctcgaaggcggactgtgccacggtcgttaactctcgcatgtacccctctgtcgtgacatcattgatagcatgttggtcgttgcgttggacgatgttgaacatggtatggggaagggcggatgccattgttgctttatcgtcatcatagactacgttgagccgagacaatctgttgggtttgccgcgccggcgaaccgctcgctcaaagataccctggtgggactgctcgtacgcttcgtttatcgaagtgtccacaaaccgcaggaaagagaatgtaccatcgtgttcggcactatgtttgatattctccggggcgaagatgttcatcaagtgagccaggtacttgccacggaagccggcgtgtagattgccgggtcctgctacatcgacacggccgtcagacccgcatagaaggcgtggcaaaggatattcgatcaggttacgtgtcgagtaaccgacatcgacgttttgaccttctcggacgaaggaggccgtttccgcaaaatgtgcgacagagaagggtgatttcgtttccgcgcgttcgaacaggtctggatggttacaaaccttccgaaactgcatgaccaagttcatcaacgtcgtgctgtcggcctcatcgccaacagcagccttctcgataaggtccatgatgctgacgcggtttcgcaagttagtgtagtaggcccgctgacggtatgtcagatcacagaagacatctttctcaaccttgtccccaagctcctgctggacgtgcttcttaacacgacgaagcatgaagggcttcaaaatcatgtggagacgcttcagctggtcctcattcaatttggtgttactttgagcgtgagactcgatatctttggagaaccactcgctgaactcgtcgtgagagtcaaacaaggtgggcatgataaagtggagcaaagcccacagctcctgcatgttattttgaataggcgtaccagtgaggaggaggcggttacgacaggagaaccccaggaggtttttccaacgggagctttgcgaggatttgattgcctgggcttcatccaaaatcatatattgccacttcaccttttggaagtactgcgcatcgaggaccactagctggtaggatgtcactaggacgtggaattcggactccttggtgtaggtgatgtgcttgcggtcccagaacttgcgaagaatcttgcggtcttttgctgagccccagtaaggaagaacttttatgtctggaacaaatttggtaatttcctgttgccaattgtgtagggtcgaggcgggtgcaatgactaaaaatggcccccaaatattgtgaacttcggcgaggtaggccataaccgagatagactgaatggtctttcccagacccatttcgtcggccaagataccgttgataccttgttcgtataagttgacaagccaattgaggcctttcagctgatattccttcaattttgccgtgagcatggtgggttgcgatatctcaatgtcacccagactcgtggggttttggaagttcaattcaccctcgtccaaagcagccatatgatcctgcccgtcattgaaggctcgcgctcggtcttgggcctccttaacggcattctgcgcgttggccattgctgcctgtcgtagggccgtttcatcttctgcgtcgaaatcgagatcctcaaagttggtcaccttagcgccagcatcctccatagcatgttcttcgtctttaccaggttgaactgtttcatccgatccctcaacggcagtatcaccagagtctccctcggcacccttgattttgcggccaatgaagtgagagtatagttcggtttgggatataaggaaattgagtttgcgtctctggcggttggcttcacgttctgcttctgctttcttggccgactcaatttcctgcctttcagcaaggcggcgtagatcacgctcttcacgctcgttgcgcttccaaaaagacatcatttcacgcatagtccgcttggcccgggcttgggtatccttcatactcttattcgtacgttcctgccactttcgagactgcttactggctagctgagcagtcttgcgcagattctcctggcgagtgctgagcgagagggccttaatgcggtagaccttgggaatatctttacgggcaatatctcgccagatttgttcataaatctgattgtagccttttgtttcgaaggcggacaggggcgcggggctactctccttggagcggctgcctttggcttccttcttgagagattccttacgtggatcttctttgggcgcaagaggaagtggctcatcattttccatagcagcataagcggcctctgccgcatctttctcggcttgcttttgctcctttgacttcttgggccgtgtaacaggacctccacgtcccgatttccgcctcgatggggagcttcggccaatgtggaaagagctggtagtgccaccttcgaggtttggtgccagcggggtgacctcgccgatctcttcaggcgctgtgacaccttccagggctcgcttggtagtcttgattttcctttgtgcccgttctgcttcacgcaaaaacttagctttctcagcagagtcttgagccttattcgctttgcgctcggcctcaagtttcttctgcatctccaaccgtaccgtgttctccctacgacgcttcctctgcatgtccttcttgcgttctttctcatcctgaatttctttggcttggacttctgagatgacggaggcctcgttggcaatccgaaaccggtccattcccgcagaggcctgcttctcgagagacttgccaaggttgaccaggaacgtatttcggcgacgctgcatctcgtgtaagtagggtattacgtgtaaacttaaatacagcggcttaccttgcgctttatgccctcctctttcaaggtatgtaaggcccgtctcttacattgcaatttgtactgttcatactcttcttcgaacccaggggcttccacatcacttttttcagcattgtcaatctccaccataagtttgttgatagtttccgactcccgttcggacaaaaccttgcgggggctgaggaaagaccatgactgagtagtcgtcttggttggctcaggaataccgttgcttaatataccgttcgagggttcacccgctttgttgtcctgctccgcgttgcgacggcgtttctccgagctcggctttttctccagtctgggtaatacctgttcctgctctttcactttctgatgcgacggcggaacatgaggtgggggaggcgggctaagctgcgttgcttctcgtggtgttgatgttaccggtgccggcgtcgtctctggtgggggggattgtcgtttaggaggagagcgctcttcggccggcccagataatatactagcgaaggacatggggtctgcagccctggcgggcttctacatgcagcaacaaagtcatacatcagtaaaggagttctctaatccagcgtagagagtgtaattgatatgaaatgaagaacgtactgcttcctttggaggggaggccggctttggttctctcatgatagacgacggatacccagcaacaccagggccgcctagataagatgactcggtgtctttcttcggggatagttgcggatggccctcaggcctaccagtcggatggggatgggacggagtggagggaccgtaaggagatgcgccgttgcctggtaagacgggcccagagtagggccgaggaagaggaaactggggagttccagccgccgagtgggcctggaactgcgatgaaggatccggaggatgtggcggaggtgcactcccgttcaatggtgggagggtcgccggtaatggagacgcatgtgaatagtgagggctccgggacatggtggtctgcggagggaacgcaggaggcgtctggggaggatgctgctgatactgatcattgttgggataaaaggggcggctcttgtttggaggggagtaaccaggataacggtgctgctgggtaggggactggggattatatggcggagctcccgtcatggtggccgcgtgtgccgaaaacgcggcggcgaatgcttcacgatgccaacagtaagagtgaaagagacgaaggcagggaggatcgtgtcagatgaacatgaactgtcacgatacgtgaccgccggccatgcgcgggaggccaggttagtgttgcgaattgtacaagcgaagctatcacgcgtccgtccggttgtcgctttagcgctacctgctttgagaattaatttaagctgctcaagtatcgggaggtgagttggaaaggaaggtaggtgatcgccgatgtgttataggtgtgaaggtgaatgagggaaagggacgacgatggagtggaaggggagattgccttactgggtgcacaggaatcttaagaggaaggctctttgtgcttcaagttggtgatgaaccgacaaatcctcgcggcgggtcagcggtttccgaaagagaacaacagtcgaccgatgaggcgaggatgcgccaaaagccaggcccagccaaggagtggtgggtgtaatcaatttgcctgggccggcggatggagctgggagaaaagaagatggaagttctgggattggttacggatcggagagatggtgatggagatggaaaggttaggaaagaggatgaggaggaggaggcggaggagaggaaggaagaaagagtgacgatggcggatgagatggtggtggtgattatggtgatggatggtttttggccgatccagtatttttccctctctggtcactttctatccgttttccccctttgcccaactcttctttcctgtctggtcttgttcgtcgtgtcgttcgtctgctgtactgcttaaagcgcccatccgaaacacgctcgtcgcggtatgtgtattttcattacttacggtaaagtagactaggccgatttgggcatgagtgagacagcctaggtcgagcttatcttcttttgcggcctacggggaatggacatactatacatgtacataggtagtatatcctataactatgtctgtaagccattggaggcaattcaacttgcacgacggttcgttcattttggtttccccatttaaccctctaagcagctcagccatagtatttagtaggtaagtaaaaatttcaacggacctccgtcatgatcaaagcccgtctagttcaatactggtaattaccaccccggatgatctcaggtagattgaatgttccatcttcgattgatatggtcagacagttattttcctacaagtttccttctgtcattgaatacccaggggatgctagaatgttgctacatatgtcggcaaccgctttctgcatggccacaacccaagacaaagtattctatacttttgcactgactttatgagataagaggtttctagtcatgttcaatctagtcctttcattccttacgccggttatgctgtttgcgcaaaccacttcagagagtcccgacagcaaagccagttgaaccctggataagcatttttttaaccgaatttccctttcctgccgttttgtatttgactatgtctaaactaaataggggataaagataaattccgtggcattaagactgtgggaatactcactaccattctgtgcaacccgccaccaacaatgactagtaagcgtttataaacacgcaccattgaatacaatccagtacacacctctaagacgcgtgctgagcaagttagctgaggccgagagtgggaagcttttacacctgtaagatgacatctctgtttgagagcagtttagcctcgcttgaaaatctcaccgagagaagatgatcatcattacccagctgctcgttcgtgtctagcggcaagggagaagagcacttctcgccttgtgtgggcaatcgaggaggcatcaactttgatctttcgatctgcttgatatccccaagactttggttattttggacgtatgtgtggttgatatgtaattgtaataaggaattgtttgatccgatgattgatatcaatttaaaggctatagatggctaagactttgggggcgatacagatcggagtgttggaaaggggcttgctttcgtttgacagcataagctatcgtggtgttacagcggtagcaaacacgtggaacaggaatccttatattgtctagatcatagacatgtcaaacatttcagacaatccccttcactagcagactacacacccaaatgctatcaatgaagaaacggacagaattatatgtacttctacagagggtggaggtcaggtggcttccgaaaggtccttcgcccgtaaggtactcctgctaggctttgaaagttttaaaaaccccgctatctgccctcaaaaactcttttgtctttctcaattgacaggagggtctgcgcggaggatgttattgtctccgtatccatgagtgcgatgagagaagacagtaatgatgacgacgagaacagaatcacaaacaaggtgatcctacagatgttactgaagacaccatctgctctgggtcgtaaaattgtcgctgactttcagggagaagttcaagtctttcttttatagcaggaactgaaccgaatcaccgacctcatgttccatacggctcgctggttagtcgtccggatatggggaagctgccgctgttaggtatcaggattatacattaatttgcggtgccttccatatgttgagctccgtacgtccggggtcagcatgggaagaattagatgaaagcgcagccatcccgcatctcagcaaatcccgagaaaaagcaagcaagaaggaagggagggggtttaacggagtagatggggcgaagtggctgccatgctgaactattacggagtacatagcgagaagtacgaacatccaccaacacagaaacggaactagcggctcacaattccgcctgaggcatccatgccatccttaaaactgactagggttgccacttccattggccatcagtcgatcgaaatcatctgatttgaagggtctcggttgaaacgacactacagtatcgaacgggatttgcttctggagtctcccagcttgaggtcgagtctatcttattcggtggtctatcccgaaattaaaagcttgacgtttgacagggaacctttaaaaaaaaagaaaagaagatcctttcttctttccccgcatgagatacggccaattttgctatatttggaaaggcttggcccaggatctggactcacttgacagggaagccttttcgggggaagggaaagtctgtgactctgtacgggagtactacttcgtacttaccacttactacttactactgacttgttagtttaaaatcgaaggaagtgcttatgcgccatcgtaccgatcgggcaatgagcctaaccccgatgacgtcggcccatggatctcctgttgttgccgttcattcggtgggctgataatcttccaatgatccaaaaatcgtttgatcgtcttggaatagcttcggtgtgtctcacagattctctttcatggttttttgacctttcctttccctctctccggtgactcgttttccatatgtccgtctagatgtgcgtgtgtatcactacaacaccattcaccttcattcaccactattattcccaccctataatacgacgtcatgcctatgagattcccgggttggatgaccgtcaccccacccattgcttggattctagacttctataagaactgtccagcgtctcaccatcagcttacttcactttctcatcacttctctcatcgtgtaaatcaaccctaactccaccgcaacctcctttcttccctttctttcaacacaagatcccaaagtcaaaatgtcgatccccgagatgcagtgggctcaagtggccgagcagaagggcggtccgctcatctacaagcagattcccgttcctaaaccaggaccagatgagattcttgtcaaggttcgctactcgggcgtctgccacaccgaccttcacgccttgaagggtgactggcccctcccagtgaagatgcccctcgtaggtggacacgagggagctggtgtggtcgtcgccaggggtgacctggtaactgaattcgagattggcgaccacgctggtctcaaatggctcaatggatcctgtctcgcctgtgaattctgtaagcaagccgacgagcctctctgtccgaatgcttctttgtccggctacacggtcgacggcactttccagcagtacgccattggtaaggccactcacgcctccaagcttccaaagaacgttcctctggacgctgtcgcccccgtcctctgtgcgggtatcacggtctacaagggactgaaagaatctggtgttcgcccgggccaaaccgttgccatcgtcggtgctggtggtggtcttggttctttggcgttgcagtacgcaaaggcaatgggcatccgtgtagtggccattgatggcggagaagagaagcaagccatgtgcgagcaactaggcgccgaggtaggtcgatgcaatactcctctccctccacctcgtctcattgatactataaagacactctctaacacaatcccataggcatacgtcgacttcactaagacccaagatctcgttgcagatgtcaaagccgctacccccgaaggcctaggtgcacatgccgttatacttcttgccgtcgccgaaaagcccttccagcaggctgccgaatacgtccgctcgcgcggtaccgtcgttgctattggtttgcccgccggtgccttcctcagggcccctgttttcaataccgttgtccgtatgatcaacatcaagggaagctacgtcggtaaccgtcaagacggcgtggaggctgtggacttcttcgcccgcggcctcatcaaggctccattcaagactgcaccattgcaggatctcccgaagatcttcgagctcatgggttagtttcccttgaactcctaaagagagatccctcatctctttttggaactatgctaacatgtgaaatagagcaaggcaagatcgccggccgttatgtgctcgagattcccgaatgaagggaacatgttcataacgcatagaatgaaaacagctacgagtattatgagattccatcgtctcttcctcagggtctccggctacagactattaaggagataagaacgccgatacagaagatacgataagagcacctatgcgtgaggttcggggcggcgggtagcatcttctagtagataggtaataattcatgatattaatttaatagcgtttcgtttacctcgtgcttagcattcatctttccttgctccgtacatatgctccgtagcgcttttagcgatgaaaaagtctgtttcgtctcgaaaacgccacaacgactacttgtgtcctgcacatcataaccctccaagatttgcctcggaaggactggacgacgagccaaccgtcgcctgaggtcccttatatatctttcttgcgtacagaccataatacagaagggcaccgccccaaagcgcaccattgatgacaactgtatagttcatatcctgcgctaaaccaagagtcaacttctcgaatggaacgaattaacaccatgaaagaaaataaaggaaaaacttacgagttggacccgggcccgtagtcggaaacatacataagatgatcgcaaacaccaagtacacgatagcggtgaccgctatcggtttactaaatcgacccgtatagaattcgccagggtggaaccgatcctgtccccagaccagccggcagaggatgggcatcatccaagcgagatcattgccggctacggcaagagaaaagagggcgttagaggcagcgctgttgattatggagagaagaccgacgatgacagcggacactacgacgccccaaatcatgcgtacgggttggtagcggatctttttactaactttgcgaaagaatgatgagaaggggagggcgccatctcgggagaaagcccaactttggcgagaggcggcgatcacctgtttagtattgttttccaatgttagggttatgggtgtgataggcatagatgcatgttgtggagagaagacggaccagactcagtcccatgcaaaattggacaattgccactactatcataaagccaagggcaccgctttttccgaggcagtcgtaatagatctatagtatcattagggctagcatgaggagttatggtatttgtacatgcatacctgcgccattagttggccaaggtttgtactcaatacaccgtccaagttgacatcaatcacagatgcaattactgcaagggagatgaaccctagagccccacagaggcctgcagaccagatgatacctagaggtacagcacgcgccgcatgagtagcctcctcgctcatgtggacacacgagtcgaatgccccaattgtccagatcggggagagccaggccatcatgaacgcccaaccttggggccaggttgtgagattttcaagatgaccgaaaatataggcacccgagttaatatgtccgcccctgattgccttcccgattggtaatgcaaggacagtggctagcacgagaccgacattgctcacaatacaggccgactgaatcttgggcatgatacgtccaaagaaggtagctatgacaccatggacgacgacgcaggccacgtacgttccgtacacgactggacgagaggcagtccagttaccatcatgggccagtgagacaaccgaaagtagcatagtagcaaacccatcttatttgcagatgtcagtggcacaaggattgcgatcggttgttgcacagatagtacaggttacatacaatccacagagcagactccgccgaggagaccgatagtattactgtatccgacaataaagctcagagggttcttccatctgtctccactgaaataatgtgtccaaaaataaaggcctcccgccgtaggcattgcagaagccaggtcggccttgatcaacgattgtcagactgatgcacggggcgcgagagacgatgtactcgacataccatggcgagaccgacgataaagatgaacacactggccgccagccatcctgcaactctgtcagccccttgtaaagttgcacgagtgagccaagagagccttaccctactcaatgagtcagccaaagtcttccaaatggagagattcatcgattcacccaaaccatccctacagggcctgcgggtatcgagaaggacagtgtcgaagcaatagaaggcaatagacccatgatactgaatgctactgcaaatacctgagtcgttgagtaatgccttcgcagttcttgtttgtaaccgagagtggctggcgagatcaatgtcaatttgggggtttgtgtgcatgggtgtttcataaggctagagccttattatcctaaagagcttacccagaagttgcatatccccagacatcactgggatgtcatttttttctgctgccgaagcagccttagccttggtatccatagcttgggattcctaggaaaaacacaaagcgaaaacgagatacgatgcccgaccaaaaggaaaacgctggtagtagggcttcgatagggtgccggagggaaggagtaggagaaggagggaaaagagttgttcagggacttcttctggcttgtcctgaaataagctcttcgtagataagcagtgtttatccccttcccttacttccccggccttcgggtcatgcgaccaatacgcctgggttgataagactgagtatcgagaggaaatgaggggaaatgagatgatcgggacaaattctaatgacatcttaaacataccctgtattattgtacgagatcaatactcctttcattggagttaaaaaaaaaaaaaaaaaaaaaaaaacaacaacaacaacaacccctctttcaataaggttcgtctgaagagattgaccccaatcatgtctcagcgataaaggaaacaattgcatgaattcttctcagtatacatgaccctctcacagagtttccagactctgcgaagccaaccaaattgcaaaacaaaaataagtacacagcatgcctaaagccggctggtatatcaagagtataagagctacaagcttgtgatgaaaccaaacgatcgaaagcaaactataggtatatgaaagaaagtctacacagcacccggccccttatgattcgattgatccaacaaaagccggggtttgatgtagtcctcatccagttgccggaaccacgcgccatgatctccagatgaccctcccgaaaagagatctcgaatagcttggctggcgctccgcgctgtctctcgcctcgacggggactcattcgcagaaggagatgcttgtgaagagcccgaatattggggcggttgggatggtgaccgccgcagtcgcgaagccgtgggagctgaaggaggaagatcatcatccgagggcgcttcatccacgtctatatcaaaggcatcaacttgatcaacatccgccgctcggcccttaccgtggctccgcagaccgaactcatcttcgctacccgcactatcactgtgacttccagggccaccgccaagtagcgtggctgtggatgaacggtcgcgggttgtttgcgtgtccctctggctgtacgcattggaatagagacgcgaatgtctccgacctttgcccgaactagatggcggcgggctggggcgacggttattgccgcttgaatagctatcgtttcggtcaaggcccctccgctgcactccgtccaaggggatggttgagtccatgcggcggggggtatatcccagtgcggtatcagatcgtttataatacgtccccccattggtaacttcgatgtcaaattcatcgtcagattcgagttcctcaaccaccccagtcctaataccaaggatttctagcatccgggctgtggtgccgccaaaaataatgacagtcagaacgacgacgacaagtaccgtagctcgcagtgcgggcgcattgacaccagttaagcccgctgccaacgccacaccaacagccccacgaagcccggcccaaaagagcattgcttgataagcgaagggcaactcatctgccacttccatcccgcgtcgacgggccctgtagcgaatgaaccaattgatcgccttggatagcgggaacacggcgaggtatcgggcaaggcagatgccaaagacagctaccatgatgaaaagaggcttgaactgcagattcctttgaacaagcaaatcaagacccaaatagataaagataaagttctctgacaattgtgccatcacctggaacagatatttcgtcgttaattgagtcctgcgcgacatgttatagtacgcataatgttttaatgtaatgccacaaaatagaagggagacaatgcctattaactgtgagtttcagaacattcggagaaagaattcggttactcaccagaaagacgaacgccgttggagaagaagtaactggcatatgcgataagaacaatcaggcaactctcaatcttgggcacgcggcggacgtgtgtatgcttgagacccagtgcggtcatgatacccacaatcatgcctaccagcatgctgccaaagaaaacaagcaagaaaagaccgatggcctcaaacagattgagaacagtcagagagcctgcatcgctgtcggcatacttctgtgcggtctcaaacaagacaatcgcgattgcatcattcaaaatcgactcgccgaagataacggtgtaaagctttggctcgactttatacaggttgaagatggcgaggatagtaaccggatccgtcgcagagagtgtagcacctacagagatagcttcaacaaaagaaatgttcaagccgtccagcggaatccgcgtccagacaaacaaaacaagtcccagcacgatagccgagatgaaggtccccgcgaacgcaaaggtaagaatagtgccaatatttcgaaaaaagtttgcctggtgtagctcgtaccccgaggccagaatgattggaggaagaaggaggttgaagaagaactggtagtcgaatgtgacgctgtcctgaatgggcgattcgggactcaaccgaatgatcaatccgacaaacatacctatagcacccgtgagacgccaattacacaaatacttgtgttgattgcggaagaataaacacaccagcaaaaatagaaaggacagtttcatggacagcttggatcttcttctgctggagaatgtaactggtgaatagcgcaaacatcaagagcataatcagaataaagagcgcccaagagctgaagaactccttggtgccagcttccggagcatctgtgcaagcccatcatagttagaaagtagtgttatgaccggatattaggcagttcagtgcgcaccttcgtcaggatcggattcggagtccgcagctctccctagcaaagcaaagcatgaaacagtcagccatggcgcgttcaattcctcgggcatatgtcacataatgtggcacagagactaggttcgctgacgcagtgacagtaacaagtgagagtgcccttggcagcaaaacgttggaagaatggttgggaggagacatacggataagttgatgaagggcatcacccatcaattggctagccatgcttacgaaggccacgcaaccacgacagcggatgacaccaagcggttagctccagctgcgagtctctggcgccagaccaaggcgcacataatccactggcaaagatagagtgacgagaacgaacgtgagataaaagagaagcagagcgatgagatacgcagatagatcgggacaagtaatcgacgggtcagtggtcgcccgcattttgcccgatgacctgccaagaatagcagtcccgccggttgtccgcctgctgatcattcggcacgttgcatgctatacctacggactaaccaaattaagaacatacaccatatgccgccccaggcgggttggtttcttcttcgttttctttttttctttttcttttcatttcccgagtaatattcacagcttctggcttatcttaagactatgactatcaccacagcttcgattcgaagtacatagactttcactttaaccgacgtccctcggcaagccggctagtcagccatgctgcaagcactgcagcgcaacctccgaacctcaacacccacccaacactatcatcccaaggttcacctctaggtttctggaacactttgaaaatagcactgcatatcaagctagacaggatctgcggcgaggagaccgcgacattgtgaagcccgagaatgatccctgcctgggctagattttcttcctcatccgttggcttcctaggcccatcctctagatcaccaacgttcgtggctaaattgggctgagtagagttgtcagcggaatgatgttctgccatccctgaccgatgtcgtcgaacccgacgttcggcatcaatccgcgcgacctctgcggagatgagcgcgaaaggtgcccacagcgtcaaagcccaggagataccgactattccaatcaccactgtcgccgcttgataagtgtagatgaaaaaggtgctaaacatgcagagagcaaagagtacatgagacaagagccaagctcggcggagtgtaaaccctgggatctgcagttttgacagccacgtcgatccgactgtagcttcgacattctgcttatctggaagagccggaggcggctccgatgcagtaccaactggtaggcttgagcatgacattctccttgctcctagaaatggccttctctcatctgaaggggtgtcagtttcctcgggtgagacaacagacctataagtagggacaacaaaaatgggtaatgttatgttagtgacaaatgaaatgatcgcatatacaagaagggcaaacgttccgatcctagtagcttcctcccaggccttgtctaattcattgtcaggaaggttcgggtgttcatcaaagatcgggttaacataaagctgcccaatgtatgttgtagcgtagaaaaggaaaggaaaccacccaacccatgcagctagttggacttcacagactttggcaatttggggtggtaaataccgaattgacttaaaaacttgtctgaagaaggccacaatgccaggatttccggtagaagctgagggttcgagccgcggatctctttcctggatatatagacagctgatcaataacgtgataacaagtgatagcgatgctagcgcacacaacactttgaactgcgtgtttcccaagaatgggagatagcgaggcaaatcaatatatccaaaaatgtatcctagaatattgcccacaccagtgagccggctggcccacgcgttcgctgattcctgttggtgggctggcgcgttatcaacaataaagcaccgaattcctgcttgaactgtagccgtttagtatggttaagccaaagtgacgataaaaacaggcctaccagtatttatagcgaaatctagacagtacatcagaatagttgcaaagactatgatcgccgtctttgtccccgtagacgcctggtctgcgccaaatataccgaggaaacctcctacgagttctctcacccatgcaagagcaagcagagccacaacagtcgccaagccaccaactaccataaagggcttccttttgccccatgacgaacgacagttgtcgctgcagataccgatatatggttgcacaagcgttcctgtcaggggcccagcaatccagacgaaagcgagcagcgctttgctcattcccaaagacaaaaggaaaggctacatgggcacgtacaccaaagccgaggttaatgcgtattcccacataggggttggattagatttgcttaccgatccattcgatagttcaactgaccagacaatctggagtctatgcattccttggtcaattttaccgtctaaagatacctgaggtttcattgtcatcaatagggcagataacctacccaccaatactcaacgttaataagaagaggtaccaggtactctttgtctctgacgaatgtccaggatcttcggctccaaagtcattctgcatttcttgggctgttattaagtcaacgtcattatcgttgtctggtcccactaagggggacatctcgtcggctactcgttcatctgcacccgtcattggggtggttaagactgaaactcttgctggtttagaagtcaacctcggctttcacggagaacgtgtaacctgcaaatttctagcctgaagcggaggggatgtgatagagagggaggaatgtagagattaaatggatgatagaagacaacggttggtgcagcaaatatcttgttcttcttttcttcttatttccaatgtcgctatgagaagaatatatgcaggtcggagtgtagcttaagaagcgtttggtgcgtttaaatgccaattaatagctagggtagaggtaccccggactcttatgtggaccaatcaatagaaatggacacagatggtatcatcagggataatcacttgctgacagagaaagtagattacctgatagtggctgactaggactagcttcgaggcaagaaagaaaagaaggagaaaaagaacagatacacgaacctggtggaaacacgcttccaagacgatgtcaatgcaggatgtcttcttggagaggctagatctatcgacgtcagcaggaccgtcacatgacgtggcacaacacattggaacgcctggaatcgagatccaaatgacgaaccatgggttacggcgcatgtcagaaggacactcaaccactgtattaaatttaccgtatttcgtgaagggtcatttacggattatgatctagagtgttcttttagacttctgaaatttcaacattccatcctagaaagggcataatgaaaatcccataatattccgcatttatttgctcctcaaaagctatacgccgcttttattccatcccgcgtcgtgcttccctcgtgattcctgcaatccagaatccccatatagaggaaagaaaaatgatacagaaagtccatccaataccaacatagcgcatgacaaccaaacagaaacaatcaggcaaaaagaattcgagtgattatgatagaaccgcagcgtaggtgcgaccagtagcacatgtacacacaccaaaatccaacgcattccggacagtagaccagaagaaaatcggcaaacctgcactgaaatcctcagaccctggcggcaggctggagagcagagattaggagacaccctcaatatgtctcaataatttgatgtagtagtccagcagccaagtcacagttgaagactttaatggctggattaaatgattcaacaaatggtataaacagatattctaaagcatgtaagatatccgaacccggaccatcaaaatccaccgtggggtatcatggtcggcaaaatcggactcattattaatgttcacgagaatcgggaaaaggaccactggagtcatactttccctcatgccttctacatctgctgttgtagaagttgcggagcaaccatgtgaggtgccatcatggtaggcatggcggaaggcagggtcatagtagaaggcatcgacgtgacagtggaaacattcaccacagtacttggaatagactcagaaggagacgatccctcatcctgcgaaccgagttcgttgtcctcattttcgaggtcttcatcttgcacatggagtggttgttggccgtcctgttgagcctcatggatccgacggtgtctatacgtatagtcagtataatagtcagttacaatgcattgttagttaactcactgtgcaaggttgtcagagcgcgagaatgctttattgcaataaggacaagggtagggtctttcctgggtgtgggttctcacatgcctacaagtcaagtgtcagtgagcgattgcaggtacagtcaagaagcggccaagtggataggtaaaagttagtggtgtcactggatagttataacataccgcttcaaatgttctaatctcttgaagagtcgcccacatgacgggatagggcatgaatgtgacttctgaggataagggccaagctccatcattgtagcgcttcgagcgcggcgaactgggccgggaacaaaccgctctgctttgttcatcgcgctgtgctgcgcgcctgtctccagaacatcaccattaggaagggctgtcaactcatcagggggattcgcaagtggcatggcagcctgctcagggttttcctcgaggcttgagagcggcgtcccattgcgagacatctcgtgtaataagttcttttgcggaagggcgcccgtcggataaccattcatgatacggcgggacgattcatgacgtggctcttccgtctcagcgacgggggccaccgaactagaaacggagcgccgtagatcacttggcctgtgggcagcgtatgcaattggttgagagggccccggcgcttgagtatgagtgggagtagcaatcgggttattaacgcccggcggtatcgaggatcgacgccgccgctgcttgtacgttggagaaccctccaaaacagagtacacattcgaatgaaatgtccttgcaggggcggggaaatgagcgcttgcgagatttgatggcggaagctgcaacatcgggttgaatgcagcagcagagatctcagggatagcagtatagagaccggtatcttcattagcaatatatgctggttcagtgccaagcggaacactgtgctgtgggggcgtaacgggttcaaaggacaatcccctgttgctgtagtcttcgtattgggacgaaacgaacgatggtgccggtgaatactcgacgaaagttggcatggaagcatggcgctgatgcacgcgagcaatgggcattccattgcgatcatactggatcgacccataatctagctcgcgcttaacaacgctctgcgccagggtattgggcatagggatcgggttgtaaatcgctggactgccagattcgtccgggaggagtgatatcgttgggggggccatctggggagccatctggggaggaggcatagcgtcaacggtccgaaccactggggaagcggattggccatatgtcgtacttgcgtgtgcagtaaacgatgatgagtttgcttgttgcgcctttgtgagctgttcatataacgattgagatgaatcaaactcgaaagacaaagcaggctcgctgaccgcgactgtagtcgcctcttgtcccattttctcccgcttcaaatcacgttccaaagcatcgagaaacagccgatcgtgtggaacactataccagtaaaaaactttttgctttttctgtgttcgaatgcaattgttcttatagagaaaatcaaggaatggactcttcggttcttctagtgtcgcatctgttccagccttgagatttcggagatcggaaaagataccctcttcgaacttcttcgaattcttcacgggacgcccgaacgcttgaaatctaaaggccaggcaccgaacaatatcggtacccgagatgtggaaaagattgttcctatcaccaaatcagctcaacgatccttcctcctgagctagagtttatatttgatcaaacgaaccatagaacacaagatatgtagtcgccagtaggaagtaggaaccgtctaatgagttgatctggttgccagtctactggcgcagaaagaaggaagtacttcactatatcgacaatcatattagcctagatttaaaggttgattgacgttaaatgacgagaatggtctagtcggccggcctctatggaaggatacccgacttacaattgtcaacttgctgtagcgcgacttgcgcgtcatgaggaaggctttgctgcgcctcgttcgaaagcatgaatgtttccggtttctgaggaggtgccatgggagcaccatgttgcggaaacattttgctcagagaatgcctgtatatcgtattaatcaggtgctagaggaatgtttgaatcaaagataagcggcattgacaagctggatgaaacaactctgtggctagcctttgaagcagcaatcagaaaatgggacggaaacctacgcacaggcacgactgtctcagaaagtggcgaaaccacaagctctaaactaaagagcggatatggtgtgggaaaagaaagtgatcaggatgagaagagaaaacaaggaacaagacaaaaaaaaagtaatttaggatatggaatcaacgaccgatcatggaaacgctgaagctatccaaacacaagaggagccagcctcttagaaaaggtgggtgggcgctgacgttgcaaggctcgtcaactcaacgaaggaagagagaaggcgaaaaagagggcaagggagagttgaagtgggccagcccggatccaagtctctttgaataactcgcacggcgaaagtggaacgaaacgaagggtgatgaagagaaagagaagggggggataaaataaagaaagaggtcagtcgcgatgagaaggggaggggggggaaggataagagaaggcggaggaggatgagtgccggaggtgttgctcttttacagcggttagagggtaataataacactagggtaataaaatagtaaaggtaggtaactatgtcaatcaatcaaaataataatagtaaaaaaatcagctagtgttgaggggttaagttaagaacttggaagaggaattcagggagcgccgaccgagaccggatgaggtttcccagttggaggagggccctttttctggctccgtcgttctcctctcactacatcaacttaattaaggtacttagtacaacggctaaaccgagtctctttcttctctagcccttggcctgtggttgggctgcgggaaggatgcacgacgaaaaagtagggcttctgttggcgaagcggagactggcgccagggaccgtcccctagggtaagtaaactcgaggtaggctgagcgccatccgtacatgatacggtacacattcgttaccgtacccacggctcatcgagccaatccaaacgaagcgcaatccggcggcagacatacaatgaccgaaggcaaggtaaaatatcaaaacatttgaaccgtcccgtacgactacggtatctggccgtgtatgacgagtggggcttccgtcgagttccaaagattccaattcttgtcgccctgccctctggggaggggccactcaactgggtcatcaacccgtttttttcttgccggatccgtccctcttcctctcaaaggttaggaaggggagttaatgttctacgccgggtccggtctattaacaatggaaatttcactattgtaggcgccctggccatcgtcgtcatctattaatcgacccttaatgtacatatgtacagtacatacttacaaaggagagggaaggattccgtagccagattgtattagtcttcttctaggacgcccctttgtacgtatgccgaacatgtggctaagatgacaaaatcgacacagcagcccggagtaggactaagaagacaatgatatcgggagggtacctggccggtagttccgatattcctctgatccttatgattttcatccatggttgaaaagagtaagtaaagcgtgcactacattgttaatacgatcattttaggcgcccgatgggggggataatgaataaaataaaccgcaaaaaaatatatataatgataaataaaaaaataaaaacaaaaataaaacgagaataaaaaaaactagaggaaggaaaaagaatagctcgttgccctttccaccactcaactaaaagtatattcatgagttagtaattagtatccaagggaggcaccactcaacctctacagaaaatttttgtatctaccgtgtattatcatcacaaaaaccaaggatactcactttttagatcttattggtgtattttatgttacttgaagctaaatattatccggaatcctgcacgtcaaagagatgatcatcacagcgcttaaaatggacaagtcatgtttggttgcacaggacgcacagtacctctcctcctattagtatgtattcccaaccatccaaatttcctgggctaaccagccgaaaggagttttgtcacgcagtggaagcgataagactccaaccatggatgccactggtggtggaaccccaaaacaatgccaagcctgcacaaatagataaaactggcgcgggagaggaattgtgaagcatttaccccttgtttcagattccatgtgagcgcctaccgcgagccaatgggcaccagtgatctggaggctcacccccctccagtggctcctatggctgtagcccacttcccggtgtggtagtggtgtaagtacgtacggagtatggatgtactttccaagcatactccgtaggtattaatttacaggcaagagttttccgtgaagaagccggcagttccttcaaatccggctgggattgatattgcttgtctcgctgaccagacggttagcgcttccaagatgatctcacagccgaggtgaagcggctttcagctataggcatgatatttttgcatggggactgcacaggggaatcccgaaggtaatgttgggatattctgtgggaacaggttgcagagaatctctgacttgcatctggttcgattcgtaccaaaaatagacgttatatgatcaaaacatgttagggcatcgtagctctctttccctttttgtcttccttttttttccctttttcttcttcctacctccctccccccctcttcagttctgcttagaccataggttagcgactatagagtgtatggggcagcaatacctttcttgataataatagcaagggcagaactaagctgccacgatctgctgatagtttcagtcccctgtttttgaatcagttttgactagccgcttactacatacagacaatactgaacaatagacatcacaccaagtcttgaccctctacagccttgctaactctactcaggcattaggtaacttgtgataaatctgaccagccatgttgaccggtcactttcataccatgacgattactgtcacctttgccgtcaggccatgtcaataggaaggagcctaattggcagggaagtcgagactgcaattcagataccctatctagttaaactccatggtatactctattggatccttctaatatacatagattaattctcctatctcgccgttgaccttaaactactagcgccaatgatggaatccaaagctaaattacattcggactccaggatcttgggcatgggcttcactactacagtatctgaggcaacattaggctaccacatccgtacttcctatcgttcgctttagattgttcatctgtaagaggtcttgtcgggtgacttattatcggcatgtcacggaacatgatcggcattgatcacattccaacgccgagtgtgtcatcttcatgtagagtcgagtcttggctgtcaattaccctgtctagtatagggtatacgtctacgggatataaagacgtggacaagtacgctaggagaattttttatattaaaatggggaacccgacattccatacaatgcgttatattaagtgacccatgcgttttgcgaactgtaaggctctagtacatgttcgttcatattcattcaaatcggtcaacaccgttagacaccagaggtgatctgcacgacccaattcttgggagagagtagcaagcttccagcgacgatcactcatcgatgagccctgcgaggatcatagttttccattttacattgttctataaatgcggttctcctgaattattgacgatatctgagatggtctctaagcgggtaacttgggcccgctgatggtctgtcctctatacatgttgttcaataaatactgtcgctgcttataaaacaccacgaacggtcaaaagtaattggcccgattgatgtatcccagtggatctacgaggagatactccactatttcggccgaatgcactccagcctaccctgtggtaagaatgcatatactcgtacagagtaactcggcgtatgtatgtacctagcatataaggaaaataacaaacactcgaaataatttttaaccgaaggtgcgggaaactacttccttgcaaccatgcgattacataaatgccggagaggttggttgttggggttagcgagatatccgagattccgaacgcgtatcaacaaggcagatctgatgatatcatttattggaaaagaatactcctggaagctacaggtatctagaacagcttcgttgtcggggccttttctccatcaagtggactcactgggttagtgcagtgccaatagtaccttaactcctttcggattcccccactttggcaactgaaataggtaattgtgcctggactaggctacaatcagcttagggttcctttgcgtcgacggacatactgcaatgcgcggaaaggattacggttgtctcatccccaaggtcactagttcgggaaacgtgagaagaaattttctcggctttctttttcctttttgtctaaagaaattttctttttctttcttttttcccacttgcgatgatcattgagagaatatggaacctggtctttggcccgctcagtacgatgggttgttgcttgatcggccatggtgaaactgtagacgatctagaaaaacttctctgaaggttcaactgttcatgtttacgaggtcattgtgtaagtcttaggtactattaatatcacaagttcgaattttgatatcatgatgccaccgtctcaatggttgcgtcctaattaacatatactttgccgaaacatagccagtctgacaatacatggatactatgttggtcagatttagtgcaacgagcgataaatgagtgttgttgtatagacttggggaaggttttgtttttgtttttcccctttttttttatctttttctttttgtcttttcattcttcctatcctttccatttccttttgcgcccccctccccacagtttgaaccaaaattcgaggcacctggatttcaacttatgccatatggagtaactcataaacagggaactgtccaagtggacgattggagcatttagtctccagtcgacttagcacatcttggcgctactagactgcgggtgaccaaagacattttccgaagttctcccctggtggcaccagatggattggtcttagcttcttcgtgtagactaggagaacaaagtacagatgtggactaaccaggacagagcagcattggcgtatgagaaaggctgccaagaggctggttaagcactaaaattggtgattacgcattctttgtttttctttctaggtgcactctagatggcacttttagatacgatcggctttagtgttgccatcaccctgaccacggtttcaagtccatgactcgcatccatgatacgatagtgatacgagagcacggcgtgcaactgcgtgctagtctacctttagggtgcagataaagagttttggtcaacaggtcgtgactcgtgatgagtgtgtcatatgcctggctgggttctttgctttgcttggaagggctgcgtgcagaaatctgaaacgactaatgcatggtagaaaatccccggtcaactcgtgatttgctatctctcctggcagtgggcacgaccctatgctcgagtccaggtatggagcagtataagggctggatggagttatatcttgctctgataattgagcactatcaccgcactattctatccatggtgattaatgtattaataggactggagaaaacagctggagccatgcaggtaccctatcgccctaaggtaaccggtggaaagggactgcaagttcggtgtggaactcctatgacccagattagtgcaactgcagagactataaactcaattataacaattcctatgccccgtgctaaaactctatggaaaggattgaatagtagatcaatagacgaggatatgggataagcctttgatccgctctaccacgaaaattatcccaacattgcgacattggtacctcctactggagaattttaaaaagagaaaagaaaggcgcggttgtgatgtctctcagttcaggtccaccgcgggcacaggtgtcctctatgttcatatactgtatatacatattatgtttactgtgtactcagtgctcgtttaatgagaaataaaagcccactcacggggaactaccatgtccagaatcagtctagaaaaacggaggattgtctcggattttttaggggccccattcctcaaacttagttttcctcggaggtttcaccatatctaggactgcggagttggaacgtgcttcgaaggaaaagcgccctagaatagccaaagaacaaacttctcgagtcctaatgctcaagacggaagtctcaggacgaactccttacaggtggatagtttgccgggtgccgtccatttgtcagtgttgcagcgtactcctcaagctaacacagcacaacggaccggggtatattctaaatccttagttaagttcatcatcaccaatagtggatggaaaggattcgcgaaggatggatgaacacggtggcgagcacaggacgagcgggggattggcagtagaactcccatcgttgcccatgtgaagatactagatagagacaataccaaagcccctgatccaggcaacgatactccgtagacatctgtcattgaccaggattgttgcgatgatgctatttcaacgaagaagttccgagaatgttccggtgtagcaggtaaatcctcattggaattgcctatcagcactgcttgctatccatcaacggcgccctctggtcttgcttttaccggaccgtcgtgggccttggatggcagataaatctcgtttgctcaaattcagagtaccccctgcaaactttccgatggagggtcccccgacgccacgctcccgtcttccgttgctgggccttgctttaggtacaggtttctcaaggatgattccgttttctttagcttcccggcgacgtttatcatctttcttctcggctttagctttgatgcctcttcggtgcgatgacggcatattttgatggtacagagatgccttggcaccaagcgattgcatccgcaagtcaagagcttttagtcgatttttaccggtcggcgcaagatccgacgatgactcgagaagatgagattctttcaatagccgttgtagtgcaagatcattcttcagatttgcgacgtcatcgccgtcatcctcgtctttgcttggtgagctcttaatagctgccggtttaacagagaaggatggcggcttcgcggtctagacatcgtcataggattagtccatgttctagaggacacatacatatcgtgcagctataccatgaaggctttgcgagctctcttatccattgattccttagccaccgcggacaagtcgtggtgctcgactacctcaactttgttttcttcgtgcccatcctctgagacgccattccattcagactcaggctcagattcttcagattcgttggtaccatgctcatcgtcggatccctgggcacatgtaatatgggtttcaggcacttctaagggctgaaattgagcttcgaaaaatttgcggaaaatatcatggctagaactatcgttcgtcgtagtggttgtcgcttcgtcttcctcggatgtcgtagatctcgacacaacatgtgtgtctctttttcgctttccaatcatcattgagtacctagtttttcgaagcgtagttgggctctgagagacccaagttcgaagcatttcatggcggccaacttgaacctatctttttcatagtcacgtgtgataagataagctgacccctcgtgggatttccacaataatgatatatcgaactacaacacagcaccaagttcaaagatccattggagcacacaagatgaccaagttccgtccttgtatcgatttacactcgggtcaagttaaacagattgttggagggacactgagcaatatccctgcggacttaaagacgaactatgtttctaaacttccagctagtcattacgcagaactgtaccaaagacacgacttacgcggaggccatgtcgtgatgcttggttcaggcaacgatgcagcagcaaaagaagcacttagctcctggcccagtggcttgcaggtcgccggcggaatcaccgataagaatgctcagtattggatagaccagggtgccgagaaggtgggttctattgctttgttggatgtcgtctgtatctacttggttgtatatttgggtctagtcggttgtgattctctcgctcttgcagtatatcaaaaccacctcgttctctcttttgccttcctttcttccctcttgtttccgtccctataagccgccgcaataggtactgattgcccttgcataggttatcatcacatcattcctctttccagagggcaaattctctcttgagaggttgaaagcggttctttctgctcttggaggtgacagatcgaaactggttctagatctgagctgccgaaagaaagacaacacatggtttgtggctatgaaccgttggcagaccatcacagaaatggaaatcaatcaaggcaagttttgctttttgccttttttatttatttatttatttatttttttttttttttcgttgttgtattaggcgttcctaggcgacctatgctcgaaggaaagaaaaacattccctatactgaccaagataaagaatccatctcgctactggagccttactgctcagaatttcttattcatgccgcagatgtggagggtctgcaacaaggtatagatggagagttggtgtctaagctctccgagtggtgctcgataccggttacgtatgcaggcggtgcgcggagcctagaagatcttgagaaggttcattcaagtagtcgaggaaaggtggacttaactatcggcagcgcgttggatatctttggtggttccggtgtgacgttcgatgaatgtattcagtggaataagactcactaaattagcggtgacttagaaatgtgcagatgtagctggtccggtttatatagatatatttctctctgttccatggtccgagcgtcgcttgaaacatcagtcaatatatggagccataggataaggccagagaagataaacagctaatgcgtctctttttcttttctttcctctctaaactaagatagaaaggaacgtaattacctgtaatgtcaaataacgcttgctacggggttaataacttcatactggcgcgggtcctgaccttgttgccgaaagcggcttaggcgctagccctcaatcggagctctcctcccgcctggtgaacatcatctatgatagccgccctccttgtcagttggactggactaaagcctctcacgcctgctcctcttgtttgtgttgtgtttattcacacatcgcttttgtaatatcatcaaagctgaacctagtcgaatcactgaaacactgtatcagtcggttgttcatcgcatcacttgtcttcgagatgaagcctgtcgtgtcggtgttgaatgcgtggtcctggtatgtcttttaccagaacaattctatacttactgcgaactgaccgaatatccttgcaacatagcgcgatcatatcccttttcgctattgtcatcctctcggtcctcggatcgttatacaaggttcgtttgctgccggatccgccaccagatcttctcgcttgatgatggcgaactttgttgtctgtcctgcgtgtggtatactaggagtggtagctaatcgagatactcatagaaggagcaccacggcttcaccggctcagagggtgagcctgaggatggcgctgcggtcgcggcttcgatcttcacagccgtgtttgtatatgccgtacgatttgccctaccttgacacagtaattagaataccacatcgctgacagtggcaatctataggcctttttcgttttctgttctttccaggcctatcttcacgtacgaaaccgcaggggaggcgccatatcgcttaactaattcgccactattgttatacccttcttttcgatgatgaaattcgcaaaatttgattctttggccataccgagatataactatgttgcccgattgataccacggagtggtctggagtgagacgtgatagcccgtacatgcagtatagcgtatgctgcagcatctgccgaacggatgatgacctgatgtcccctgcttctaggtacctgtgtacattatgtatcatgggctcactgaccgtcttgcttcctattgttttaggcttagcttttgatttgctgttctaagtgctttattactggtgtctccttgtgttgtacataaagtgttggttgatatagaattggctttcctcactattcttttgtgcatatggcttatcatacctttacgggtatcctgctatactatgaggctgtgcgcctgtctggacagctgagtacgaactagtgttcaaggttgacaaccagttggcttcacaagcgtgcatgcacttctattttagtttatgtacaagaacgtatcctttccaatcttcggacacagacggattatttttgacacctagaatgcagaaagacccgcccttcagaacgccaatgccataacccctcccaatcagcaaaacttttcattgaatgttgctcgtccatcatcatagtcatatcagccaatgctaactagggcacacattatagctcttcatcctcgatagggtccaacatcttggacatataagggccatccaaggtatagcctagacgcgcgtaataactacgcacgcccacaccagagatgacactgattttctggcttccgtgttcctcccgcgcgatgcgttctgcttcctccatcaacaaagtaccaaaaccacggtgctggaacttgcgtggatcacgcccatgcaacggcacagcagagccatacacgtggagctcacggacgatactggtttgttggccagtaaattcagggcgaaaagtgtgtgtagggctgcactttcgcaaccgcaacaagccgattagaatgtcttgcttgggatcctcgtaggcaaggaaggtctcccaacctccattggctgtgtagtcgcgtcgaataagttcgacctgggatggacgaatcttgttcttgacttcattaatgccgacttcacgggtacggacgtcccgacatgtggtgccaaagtccttcatcctggctaaagcaagttcacgcaggttgccattctctacacctgaagtaaccagcggcatcggaatatctcgttggacacggtagatacgggtccaaggagggactagggcaagaatacgagccacaaggtcaaccaaggcattgggagtatagttcttataacgaccagtcctccatagttcatagaggccagtgcctcggatcactaaagttgggtatattttgagaccgtcggttcgaaaagcagggttctcgaagtattcctggaattggaataggtcacgttccatcccaacgttcggcaagtcgggcatcatgtggctgaccaccttaaacccggcatcctttgcaagcttgaaggtttctgcaactgcagcaacggtgtggcctcgatttgtgtctctggcaacatcttcgtacaaactttgcacgccaatctccaatcgtgtacatccatacctaagcatgctgctcaaatgtgtatccaggcaatagtcaggccgagtctcaatcgtaataccaacacacttcacattgctcatctcaccggcctggacggcttcgtcgacgttgtcggtctgatatccactcaacgcattgtggagctgggcgatgaacgattcgcgataatcctcgggtagagacatgaacgttccacccataataatatattctactttgtcgacactgtgaccaagagatttaatttgatccacacgtcctctggcttgctcgaacgggtcataacgtgctctgatagcacgcatcgacgtgggctcatacccggtataggactgagttgagtactcgaaatcggagtcgggtccaccagggcagtagacgcaaatattaccggtgtatgcgatatgaggacaacggtggggtttgctcatcacggctacaacggcgatacccgaagacgttcctaggtgacaattagaaagtgtccagctgtagtcgagggactagagacatactaatcggcttagcgattagtttgggaaggatgtatttcttgtaatgttccgggacagcagcaataatggccgtcaagggcggcagatgggccaaactgtgctttttcgcgatttggttgcgcagtctgttcagattaagatctttctttggctttttgggatccgtttcagcttcatattctcgaataaggacgttagcaatatcagagcaagctcgcatgtaacgttcattctctggaggaagctttgcgtttgtcttagatttggagggtggcggcatagtcattgtggccgtcgccattttggaggatttaccaccacggagatggcaaggaatagaatcaaggaagtcttagagggataaaaaaaataaaataaaatcagataagaatattttcttttttagaaagaaaaaaagaaaatccaattaatgttaccccagatggtgatcggtctagggtggtttggtttggaggggccgaatatcaaatcagtatgcaagaggaaaaaaaaaggccgaggagactgagccgaccgcccgcgacaattcgggtccgcttaaagctttgtcccgaaagttgaaatccaaaccgtccccggcgcgttcctaactgctataccgatcaatttcccttctcctccacgtcaactttcacacctctggtgcaatctcccctcctccctttcattttatatcctctactacaggatttcgtcatgcaggccttccgccgtagcactgcctctgcccttaggaatgctgccgctgtgcagcaacggggatatgccaatgccccggcctacgctgagaccattaacaaccttcgcataaatgcggataccaaggttattttccagggcttcactggcaagcagggaacgtatgtatactttcgatcaagtgtggtttcatacatgatgctgacgttgcatttctgtcctcccgcagtttccacgctgagcaagccattgcctacggtatttttttccccttcacatacctcagtgatcgatatgtgcgataatatggacaatgtagcttacagtacttaggcaccaaggtcgttggtggtaccaaccccaagaaggccggctcgacacaccttgacagacccgttttcgcaaatgtgcgcgacgccgtgaaggagaccggagctactgcttctgctatcttcgtcccgtatggctctacccttgatcgtggaggtctataaacatgttgctaattggctgcagccctcccctcgctgctaagggtattgaagaagcaattgaagccgaagttcctttggctgtttggtaagatgatcgtggcctgtataaagtcatcaaccgctgatacactgtatcttctagtatcactgaaggaattcctcagcatggtaagtttgcctgtatcatgcgaactatctgtgattccagagtctgactggtattctactagatatggttcgtatcaccgatatcttgaagacgcagaacaagactcgtctagtcggacccaactgccccggtatcattgctcccgtaagttacaatcgcctaacgtgtcatcttgtgggtatatttggacagatatttacagtggtatagggccaatgcaagattggtatcatgcctgggttcatccacaagcgtggccgtgtcggtattgtttcccgttccggtaccctgacctacgaggccgtcaaccagaccactcaggctggactcggtcagtccctcgtcgttggtatcggtggcgatcctttctccggcaccaacttcattgactgcttgaagatcttccttgaggacgaggagactgatggtatcatcatgatcggtgagatcggtggtagcgctgaggaggatgctgccgagttcctcaaggccaacaacaagcacaacaagcccgcagttggattcattgccggtatcagcgctcccccaggccgtcgcatgggtcacgctggtgccatcgttagcggcggcaaaggcggtgctgattcgaagatctctgctcttgaagctgccggtgtcattgttgagaggagccccgcttcccttggcaaggctctgctcaacgagttcgtgaagcgggatctggtttaagtaagtgagcgtgggatgtgagtgagtggggtgtgtgattgaaccagcatgtggcatctcactgctgaaacctatattctaaatctgctagatgatcttctcttggccactcctgtacttttcctgtttcatgttctcctttgtttagagatgctagggagtaattagtttcctcatgtaaatttttctcttttgttttggcccttgctttactccgtctactacttgcctaccgtagaatgtttcctcactacaattgtctgcaacacgcaatgccggaaccaataatgtcaagcccttggaactgttcttgtgagatgtgcatgtcagtcggttgtaccatggagtgcccccttaaagatagaaaagatgaacaacctcaattgggcaaagatgctagcgttgaagatcatcgggagtaactggaaaggggacctagatgtgattctttagtttacagctctcatacgtttgccccaaggttataagagccaggaatggattacattcaaccccctatctgtcgtaattctcctcaaaatagctacagtggctggattttccgcaagccgaagtttgggcgatcgtcacgaacgcaattgatgccaagaccactgggatttatgtagtatccttgctagcagacggagatctaccgaatctaccagggaagccggcaatcatacaaatcaaaaagacaataaaaccctgtaacatgggtgtgtcgatcactcagggacgatcttacgctagcctggcttgacctgaaccaccagctcgtccggaccccgataaatcccctactcaatcagatcctttcgtcattagcatctttttcctatcagtctatttgagctgttgtgggtactccctatttttgaccttcgtcgtggcaggcccttgaccggcctacccctggcacatatcaagatgagattgaaagaatgatagcaaagataatgcatgctgcacgagtacggatggattcttgcgatcgtacgtcttcctcggtcattattgcctcagaactaaagggggtggggttctcttacgctgttgattctcgaacggctgtgtttcatgtaggtaagatatgatcaggcacaggaggcaaattgacacagcgactctacgttacgtggcaattacgcttcaagcctttcgggaaggtggagcttatggggccttatcagacagtctcaactcaggattcattctagcattaaaggtcaagcttgggttaaatgtagctccgcgtcactgaggctgagggataatctttcatggtagacttgagtaatgactccccggtaataggtgttttccatctttgcttaccatagggcttttggtttcacattacaatttggaatgcttttcatttagagtcttgcatatgcacgggatgctgctactagtatgcatctcactgtctgacgcgtctctcggggttatttgttatgaatcattaggctcacatggaggaggccaagtttgtatacgctcgctaacgatctgtggacccacggggctaacattatgtatacatgtttctatctgggatttgtcggccgagggataatgacccgtagatcatccctcatactttggtgactgctgcatgagctgccagaaggtcctctctatgcagctcaaggccacctctccgctgcccatacacaggagaatagttctcctcaaggtcttatcaattcaggccttaggtcccacggagtgacgatctttccttgcactccacatgtactgttctatttgggaagggagctagcaaggctccatgtattgtggatcaagtaacttttctcctgctcccttgggtagtcgatgtacgccttggtactagaagtatataaccctcaattagaaactgatttggcgctgggaagtttgatatctatgctatccgtggacatcctccgtttagagtatttatagctgagataagtatcttcggggaattgattccagaactatactttctccaccgctgtaatcatggctacagcaaggtcagataccgacaaggcccctatagtctcttttgttgaagaagatgagaggcagccatccgactcccagctcgaagaccaagttacccaatccaaatcacatcatattttctctcgtcgtaaaaagttgcaaatggtatgcattgtttcaatggctgccattttctcccccttatcgtcgaatatttatttcccagccctgggcgaggtgtcaagggtaagtgcgacaaaaacaaaacacagcctgtgcgacctttcgagggatggtatattgaccaagctctatgtagagcctgaatgttagcatgtctctcgccaccttgacagtcacagtatacatgatcgtgcaagggatatcacccacgttttggggttcgatttcagatgctacagggaggcgtccagtctttattgggacgttcattgtgtacatgattgccaacgttgcccttgctgtgtccaccaagtacggagaactcatggcttttcgtgccctacaggctgctggtagtgcggctacaatttccattggtaagcttgtccccattaatagccaaaggccaggtataagttgcttacaggatcactatttaggcgcaggtgtcattggtgatatcaccacttcggcggaaaggggaagcctggtgggtatatttggaggaggtaagatactggttagacccattcttcgtttgtattgggcacttggcggacaccatgaacgtatggatataagctgacacatcgaagttcgtatgcttgggcaagggatcggcccggttatgggtggcatcttgactcagtatttaggtttccgctcgatcttctggtttctcacgatatgtgccgccgtgagccttctgtctattcttatatttctacctgagacgctgaggcatatcgctggtaacggtactgttaggctgagaggtatccataagcctttcctgtatgtggttatcggacagaagggagccataactggggccgaccccggccagaagaagcctgaattgacatggcgtgctatacttgctcctctcacattccttgcagaaaaggatatttttgttacgcttctctttggaagcattgtttatgcggtttggagtatggtgacttccagcaccacagatctttttcaggatgtctatcatttgacatcattagaggttggcttgacatttttggggaatggtaaggcacactgtcacatcactatggctagataaaagtttgctgattgccacctgttagggtttggatgtatatcgggatcgtacctggtcggctaccttatggactataaccacaaattgacggaacgcgaatactgtgacaaatatggctacccatctggtacgcgggtcaatttgaaatctcactcggattttcctatcgaagttgcccgaatgcgtcacacttggtggattgttgggctattcatcgtgacaactgccgtctatggagtctcacttcgaacacacatagcggttcccatcattctgcaatacttgattgccttatgttcaacgggaatatttaccatcaatagcgcattggtcatcgatctttaccctggggccagtgcaagtgcaacggcagttaataacctgataagatgcttggtgggagctgctggagtggcagcaatgcaacccatgctggacgtgctgactcccgattacgtctttctcttgcttgcggggatcacgttgatcatggctcctctattatggatggaaagtcgattcggagcttcatggcggcatgagcgagagatgagactgaaagataaaggttgtacatgaaaaatcgcgtagatcgattctgggagtctggtatgtactgtacatagatagatgcatacataatacatacataaagctgtacatcgtacatacactccctgagcggatgcgctttttacggtacatcattattactgtacctcgtatcatatctcttgactgcgatcatccctttgttgtgtttgtttattaccggaaaagaaaagccaataccaacgaacgaactaactacaggaatgccaccttatataatctcagccacacgtgaccgctcccgcaaacaagcaaaagcagtcgttgcttgaggaacgccgatctctgtttatcctccttccagctcacgattcttcgaccttgaaacgcggctgctatgagctttccatagcaagtctgctgctagaccgaccctattaatgccctaaagacccgactttcgacttgactttgattaggctctaatctcgcgaggttcccctgcggtacgaaaacgtgtggttgacggtggctggaagggatcaaaacagacgctattgcccgtggttaccgaccgtctcccacccaacagcgagggaaccaaacatcgtggtgtgctggggcagatccaaaaaaagatgcctcctgagatgggtaagaagctgcatccacctcctgcagagcctccgactttctgtcattggtcttaatctgtctctccactgccgtacttgtgtgtaaatattcgccggtgttggctaactaaccgaatcaacaggccgagctgcctcgcaggcctcaagtgctgcatctcaaacaacgcagatagtagcgccacatagtcgtcccgcgacagcagatctcatgaggtcgcgctcggaaaccgtagtatcaaggaatggtcgccgcccaagatctagaggctctactgccagcatccattccaacaccacccaacaaacccaggaccagcagattactgatggatttccgcaattcctcccggctcaagccaacgccagccataatgtctttggaggaaaccctgaggaaatcattatgcgatttggtcagcaactttcgcatcccgtgagcggttcttcgctggacccgactatgtctgatgctcatcaccccgtcctgccaagggctgaggatttcccaagtcatgcgatgcatggccaccacctctcccaccattcaatacccccaggtatccatggattatcttccttgccaatgccgcagtatcaagcgatgtatgacagcgggatcgagaatcatgtcccagaacatgttctagaggagaacgagaattccgaggctggcgcgaaaaagaaaaagggctcaaactcttctcttgcgaatgacaatgaactgcgaaaactgctacggcaatacgaagggtattccttgaagcaaatggctgcggaagtccttaaacatgaaggagctgggggtaaggctgaaaaggtaaagcaagtctttgctatgatatggtgagcaacggaatgacccaattatatcggttgcaatttgttccttacgcgcttctaggttgaaggagaattgcagaaaaagcagcggttctgttcggcgcgatcgtgtttactgctgctatgcagagaagtgtggaaccgagcgtgtttccgttttgaatcctgcttcttttgggaagctcgtgcgaatcatatttcccaacgtacagactaggcggctcggagtccggggagagtccaaataccactacgtcgatttaacagtcatcgaggagaaacagcagaagcctctccccttgaacccccagatcccagccaacacaaccggttcagccgcatccacagagcacaaagtgggagaagccatgcagaagaggtgagttcatcacggaagaagcacgtcaatgtattcgaaactgatcagaactagtgttagtatcgcaccgcagcctcctgcagacactgcagttttcccttcgcctaccacttcattcactgccagatcctcggggagtttcccgagctcagattgcagttgccatacttcgtcccggtctagtggcgattccacagctacccttgaaaacgtagcaagccattctggaaggataatccaccagatgcttcaactaccaaccaccgaagactcatccattgataatgacactctacaacttcctgacattaatgactatgtccccgttaatacggattcgaaggttgctgctgccctagccgccctttatcgatcacattgcatttctgtcatagacagctttcgatactgcaaagagcggaatctacgacattacttctctgccttccacgggacgctaaccgtgccagtacagaagcttctaacacaccctaacctcgccccctggataaaggaatgtgattggctcatgtaccagaaaatgattgcatttgtggcaccgcttacaactcaagtcgttccgaagctcgtcctagacacctttagctcgatctctcagagacttaccacccatatcgcagatacgttcaaagcgcaaccgatgcatgtctccctagcaagattaataccggcgcatatattttgtaaccttctccggcacatgctcgatgtcaatcaatccgccaatgcagccgcagcgtggctgtgtcaccctgataacagaaaccaaatgtggttcgacttcaaaacgctggtagacccaaaggaaatgatttctaaagcgaatatcccaagctgcgcggaacaggccaccgaacaaattctcaagcatgatgttcgagcccttctcactcctatcaccgatctgaaccctgccgccgcccatccgttctacacaaagcctgattcagaaggaagcattcagtcacataagtatcctgtgcagtcctcaacgggtgatgactataacttcccggataaatggatatcattcattctcaatttaccattcgcgtttccaaatcaccgtacgaaatgtatcatagagaagatcgatgcgttgtgggattgcatccttcgtcgattaacattagggggagctcagagctttagcgcttggtggatgaccaaagtattctttcatgaaatgatgctttggcaagcggaaaaaggtggttttatgcgctatactccgagcacattgcaaagcgcgagtgcgagagcagatcaacagggaccaagtaacattcccatgaggcagcctagctatccagactctgttaagaatggatccttcacggctcctaacacacaaaatactgttgactcaagatctggattagatacgcctgcctcggtagagagtatccacccggctcgatcctctttggaacgttcacaggtggacgcagaaccacaatctaacaacgctcctaatgaaaagccagcagacatttccgaaaatattgctagctttcatgcctcaaacaatgatgatagcgcgattgaccttgacgatgattcaatgctaatgaccgtgggcaaatacggcgatatgatggcctctgatccagcagatgctgaaggcgatgttgtcgtcatataagctgactatacatattcacttgatttcgtcaaagttttggaaaaaaaagaaacaaccaagttttcgtttgtttatgggtggagttttaatcctcattttaggagtcttgtttttggttggtgattatttacgttcatgtacaaggaagtttcggcgttcgacgatcttcgcacgagagacgagaaatgagcatcggtcgagatacatcaacctgccgcactgcggtcctttcaggttgaaaatcatacacatttaatagcgtggttgatcccgctctgaatcgcttattgctttctttgagtttttagtttcccatgtcagtgaccgacctgttgtacatagattccggtcaacctgtttgcagatgatctacagaacttctcattgtcatggttcattccacgacgcctcattttcctatacgctcttttaattgctttggattacccttttcctcttaggcatattgcatttcgtttgtttagggtctttgacaggctctataccatccgggcagagaggattgtggccactttaagtcttggacacggttggttagcagacaggccgacctttttcttactttacaattggggtttcgctttattctcgcataattttggccagcgccttgctacctctttacctaaaggacagttgaccgttccaattcacaccattcctctttgctgtcgctggctcctcgggtagctggcgtcttcgacggctggcttgccttccgttagtatcaaatccaggcgtcttctatagtggtactgattgactgggttggaatccttaagttcaagcctcttcgtaaaacgttgatgatctacgcccccagtgtttgccggatttactttcactatttcatcatatgaccttcgattgcaaagcaccatgttgcatttcaattgcgcgtgggaggaactcacgagtacatgttgatccacaatatctaagctgccataagctccataggacatgatttgatgagaggaaatacgccaatagtacacgctgcgtgataaatctacttgtacgaatggagtgaatataatcatgctggctggccggaaatataatcgaaggtgaaagtggctgtgacctggacagttagggcatctttttcataagactccaccatttatattcgaataagcggacatagtacttcggtagtctagcattatgtcacagacaagagcccgtgagggttatctacctgaaacctccggcagggaagtatcttggcccagcatagccatgtgctatgatgctctgtatatcgatgttgcctccgtcgtgggggctccatagcttgatcagaatgtatcgcccggaactatagatattgattagctctaatcctacgggctcaaccgcattggaaagaataggggccatacggaggtggatcgaatgtaatgctgaccatgctcttggttcgttcaatgaagaaacgagcgtgaggttttagcaattccagattaggattctgagcatcggatccagtgtgcggaccagagaaggatgattgtggtataggctgaatgatactggggaccggacgtcgtcttggctgcccgtttctttccatgacgtatcggcggcgcatggatgtcacgcgcctgagtagctcgcggtgtcgacggttgtacgtgcttaactcggatgtatcttcatcgctatcgctgtcatcgctttccgaacaaagaaaatcatcctccatctggtccatctgtagtctctcaacatccgcaagtgatggtaagtcgctcccatatcttcgatcgccgtgatcactattctcggaacgctcatcatagtctgttataacccgaaaccccgacaccgggtcagggatggtgcctgcatttagtcctgtagggtcactgatatcggtatccgactctgaataagagtcccggccagtcagagactgtaggggatgccggtacgcattcagatattcctgggaaggctgcatttcagtccgacgatttcgccggcttcgtcgagaagatgtatactggatttggtactgggctgtacgggccagaagttcgtcggaagtcatggatacgaaaaccattccttcttgtatcctggtgaatggttattaacaaacggtgattagccaagctgctcagatgtaacatacggagcatcgtagccagacttgggagccttaatcacaatcttctttaagcagaacggggtctctccacgatgcttcaaaatcagattacaccggtctgattttgtacagtaaacagaagagtcattgcgaaggacgttctccggccatgtgctttcaccatcggtttcataagtgcctccatcgcagctagccaattccatcttgagagctccggacacaacctgaccgtactgaccgtaccggaagctctgtaaaccctctctgttgtcatctgattcgagcttcctacgtttgatcctccaccggtccccatccgcttccccaggaatgccgatggcagttgcggtatggggtgcggattcgtctctaagctgattggaagtggggccttggttccttctttgtcgacctgtcctaccacttcccctgggacgagtagagtgtccgctagaagatatagaagaatcggcagtactggtgctagagtcggtgtccgtcgcagcgacatttagagcgtgcaatctctgcatgcctgggcgcgggatgtgttgctggatctgtctatcaaccattgctccagtctcttcgaagtttggccggtcccgcacacggccggagcgatattcttctatctcttcgtttagagtctctaaggcgcgggcagtgctgtggttacgttccgaatgcaacagatctcgtagatgctgcaaactgtttccagtaggatagtgtggtctatcaccggcacgggttccacgaggtacacgaagagaggcgggaggataattgtaatttcccgactacaattatagccaagatagtcaatacacgccgaatatgaggtacacaattatccttgtacaaaaggaagtctgggttggcgacgggataaggtactaacagcccgacacttgacgtaccattctgtatataaagacgatccgcggttagttcaacggccagaggtaggaggggaagaagaactatatcggggaaagataaatgggttatgatggaccagcagaggaggaattaaggggaaggataggtaacccacagagtgtacaaacaaaccacctggaatgaccatagacaaaagaaaggccaggtctggagttgatcggtgaagatgataatgatggccaagtgataagtgcgggttatcgcccgtagcgtcacacgtgatgctggggtatatccgtctatcatttattcacttactacccatactgcttcctacacttctttcctttgctcttctcagctcgaccagaacttcagtggacagaccttggcacttcttaacccaaaatccaagttgcctcagctgtcatctactgatttgcccccatccattcgttgcgcctcgactctctgatagttcccgccatccccggcagaccgcgagcgctctgttgactcttaaatctattgagccctcatcaatcccgaagcgctctagccccatacctgcgacttcgtgcaaagcaacaccatctgactcgtcgctaaccagaaggtgaaccgcatcgtgggaatccggttggacactatccacccaacaccatggagccacaaagcaatacagctcagtctatcagtgcaggtaaacatacctctatgcactctcaaagatatcagtgtacggagcatagatcgaaactgatgtaagggctcttacttgaacagatgagatcgccttgtatgatcgccagatccgtctttggggtgtgaaagctcaggaaaagtaagctggcatccttcaatgacgcgcattttgcgcctagcaggatacttacatctcatttaggctacgatcggcgaatatacttctaattacctttaaggcattggcaaatgaagttgctaagaacctcgttctcgctggtatcggcacactgacaattgttgaccatgagaccgtcaaggaggaagatttgggcgcccaatttttcgtcacggaagaacacaaagggcagaatgtaggctgcgccttgctggagaactatgaaaaggggcatgctaatcgtgaatcaagcgcgcgcaagcggcagcctcctcaatacatgcaatgaacccaagagttcagcttcggatcgatacagatgacatacacacgaagcaacccgacttttttgcacaattcgatgtcatcattgcgacagagttggacttcgcaatgtacaccaccataaatgcggcatgccgcatcgcaaatcgtccattctacgcagcagggctgcacgggttctacgggttcgtattcgcagatctaatctcacacgattttgttatcgaacgatccaagtcaaacgtcccttcggctacccaagagactccgacgcggagcatagttaatatcacgacgaagaaggaaaacgagaaagttatcgagatggttaccaagcgagagacatactcgcctctgattttggcaaatacatctcccctcccggaagacttcactcgtctgccacggaaacggcgacaggtcaccccactccttacttgtctccgagcactgtgggagtttcaaaagctatccggaggctgtatgccaactttctctcgtcaagacctggagctcttcactaaactcgcccgtgatggccatcaagaattgaaactggatattagtaccctcgactcggaattcttgcgcaccttcttgcagaatctcggaagtgaactaagccccgttgccgccgttgtcggtggtaagctagcccaggacgtgatcaatgtattgagcgtcagagagcaacctatacagaacctcttgctctttgacggcgaaaagtccatcgctcctatctaccccttacacccatttttccctccggaagttgagaatgccatgcccgtcattcatcctgctgcgaactcgatccctttgaacggcgatcttactttgcaacaaccaattattcctccctcaggagcaagcgtctgaatagcaggggtagagaagaaacattagacgctaaaggtgatcaccattttgtattctatgagacctgctgttctgtttaaaatccctcgccgtttagggcataattatgatttgtatgatagaccaaatgagcgtattatgatctgcttttatttatactccttgaatccctgaaataatttgaaagaatgtagacgatggactcaattcaccaaaatctctctgcggggaagctcgtgctatcaacccctcgtagtctcttttctgactagaggagaactctcctcatctgtgactctttgggaacccatggtatggctgtctgcagctgctttgctgtcatcttcctcgtcagatattaggccttctagctcgtaggcctctgcgtcatgaatgtgctgtgtttcggagtttgagcgaacatggccgttgaggaagctgccgtttgcgtgagtggcgccctgagcttcctcttcttcgctcgaggagcgagcaggcaatttcttcccagaatcaggccatacgtgtacggcatagatgtggaggaggatgttgacaactagatatcatgtcaggaagagtaaaacggtaaaaaatacccagagatgctcaacatacaaaggaatagaacgaaagcaatgctgtacaggatcaaaacgtatgatacatgagtaattcctgcgtcatgcaaaagttgcatctgctcctctgtggcgcccatgaaaaggaagcccgaagcatacaagagctacatattgttagctaaaacatattcactttcgggtaatttgcaccccgataaaaccggaatacttacgaatggtggcaaatactggaaactgttgggttccgagccatctaagctcaacgtgcttcgatccttcaagacaaaggaaatctcgattattctggttagaccagctgccatcagtgtataaccaaagatagtgtgaatcattgtgctaatttccaagaactgcggatgggcagacatggcatagccagttagaagaatgacaatagctgggatcaaattccgcttcggccgaccgttgcggttacgactcagccacatgcccaaaaggccagcacaccaccagacaattcccatagtggtatgttgcagatcattatggctccagtcacttccccaccgatgttctgtgaaagtattgacacatccccaggcggcaataatcaacgagtcgaaaaattcctggcttcggccagagcgacgtagccaaaactggccgacaagaagaaggatggtgagcatgatcccgtaggcaatgaaggcgctgcccatgataaagtgggctaaacactgtcccagatgatcatcgtggcagaagcccatcgcggttatgccgccaaacagcatctgagcccaactaacaactggcatcgccttgccgataacgccatgcattacaacaataacccggcgaatgcgtccatggatgcctttagaaaggtgcagcttaaggtagaaaccaataacaacttgtactatcatcatgagcatcagaatatttgcgaaggaagcatggatgttctttgagaattggcggcctttatgggcatgtcccaggaaataggctacaattgccacaatcgtgccaactatttgtaaaggaacgtgccatcgtgaacgtacaacctgcaaagatacacgtgtgaggttagatgacggttgcgcccgaccggagggaatagcaagacatacccctagaaccattcccagcggaaatatgataccaaaggcaagccccatcagaatcatatgcacccacaaagtcgagtcctgcctccgtcagtcttgtccgatgggattggtctatcgattaaggcacgtacaatgggttctcccgagatagcggcaccctcgggaacattttcatggccaccatggcccagtgcgggtgagaccagaagtaatacagcgagtaacccccgcgcatatgatttactcagcatcatcttcaagatggtgcgaaataactaaaatgacggatggaggtaggggaagtaagactttagatggacgtcgatttgggcaaaggataagaggataagcctttagcacgggtactcggggaaagacgcaaatcggccgtctcggattggcggggcccaactccactgcttagtgcctgcactaaccccagtctagttagtataaagttacctacgttactggtatatctggaatgcctctatatcgtactacactcctacaatctacaaccatgatttctcctgattagtgaccttcggtggcttaccagtggatcaggccagtttaatactatgatgtgcggagataaaatagacgcaactaaaaacggtaacgaatcacatcctacccatgaacaacagacatgcagggaaaagcgtttagtatgtgactttttactttgctttgatccttactcatgtaactaaggatcagtcgaaaagccaacagtagaagctaacggattgatagacctctctccatgcctcggtcgcagttttggaggctgaagtggtacgaatggaagctcaactggccgaaacaaaggttagattaaagtatggacaccatatcatggctttgacgcaaattttacaaggatgatgcgtaacaatagagtaaattctaggaacgacccttctgcgaccgtccagcgacatattcgtctacttcatgaatacaataagattaaagatattggacaaggcctgatgggtctcattgctgatgcgcgcggagtgcgccagattgaagtgcagaaagaatacggggtcggtgatcgggattgaatactctgaactgtgggtttctacaaactttgtgtcatctaggttctatggcatccgctcattgaacgctgtaatttcagagttctaactatacaaaaaaggaaaggaaaagaaaaataaaaccgcctaggactcttagtgttcaacagattcttacctgtcattactcgagccatggcatgattctctggttgtatgtgtctaactctcctgccttagcgctaatcttcgattacttgtttcaatatatcatgccttgaatgatgaatgtcgcgggaccttatgtttttatgctttgttttctatcctatatcagaagccagcacgcccttaccaacagtctatgcatcatacatgtgataaatgtgggaggagagaagatcgtaaaggggtaacgtatatgagctttaggcacaggatatcatcaacacatcatatcgagatagttcggtgccagtgtataggagcaatagagaccatgaaatggtattttaggaagcatgtataaaatattaaaattagtgatccttgcctaaactttgtaggttgaccagttcataataacggcctttgttgcggaccagttcttggtgtgttccgctttcgacaatcttgccctggtcaaatacgtagataacatcggctttctggatcgtactcagtcggtgagcaacagcaatcgtagttcgacctttggcggcggcatccagcgccgcctgtacaactttctcggattcagagtcgagagccgaggtagcttcatctagaaggaggaccttggggtcacggagaagggcgcgggcaatagcaactcgttgcttttgcccaccggataacatgcctcctttgttgccaaccacggtgttgaatccctccctgtagatataccgtcagtaaaaccgcgcgaaaaccgccgaggaaggggtaaatactggctgggaggtgtaaatgggcacttacggaagagacataataaaatcatagatatttgcatccttgcatgccttaatcactgcctcttcgggagtgtggtcttgatcaacacctagcaagatattctctttgatagttccttgatacaaggtcggctcctgactgaccagcgacaaaaagctccggtaggaattaacattgagttgggtgatgtcctggccatccacaagaacagagccggacagtgtatcatagaaacgctcaagcagtgcaatggtagtactctttccacatccactgggtccaacgagagcaacatattgaccaggcttcacggtcaaattcaacccccgaagaaccggctgttcgggacgagtcgggtacctgaaatgcacgtcgcggaattcaattgaaccttccacagactctagtttcttgccatcttccgaccacgtatcaatggtaggttccctgtcgaacagccttttaaattcagctgcggcattcttcgccttgcccatgtctggcgaaaaggagaatacagtccccgcagactgtgcaccaaagaggatctcagagaagcagacgaagaagcggaaaaccgagtattcatgtttaccgaggagagtgccaccataccaaaagccgagcgcaacacaaaagaaaaccagagcctgtgaactggcataaagtagtgacgacttcaaaacagagattagacttttcttcccttgggattccagctgagagtgatacactgtccacacatcccgttctcgggtgagagaagccacggtgcggatggctgaggttgcttcacaagcgtagctcgcagacccttcataggcaatcttggaacggtgctggaactgagcaagcatgtagaaacggtaaaatccacatgccagaagtactgggacaacggagatacagaccaaggccaatttccacccgattgcgagagagatcacaattgctgccccaagggttgtgctagtcatcaaaattgtgcccaacgttacaccactgactcccgacaaatgttttgtttcggttgacaagaaagaagttagggcgccagtgctgttttcctctctatcaaagaaggtgatgtcttgacgaagaatcgttctaaaagctttgcttcgtgcgcgacgaatgagtctctcggaactgacggcaaatgcggcaccgttaatagaaagattgataaattgagcaattccaacgacaaaaaacatcagagaccaaaagttcgcatcatgacggagcttgccatatgtgctcgggcctgctgcacctaaagagagtgaactgatcgctttagcgtagaggactgcctgggtgggttgaccaccccctgcaaggaccgaaaaaaccaatccaatcaacatatagcttagttcagggcggttgaaagaagcaatgaatttgatcagtgaccacagcgagtatttgtgggttttctcctggttcttcttggcgagaatagcgcttgataccgatttgtgggtggcagaacgtccgatcccagagtaaaccttttcgtctccaacgtccacaactgaagctgcaccgctgtcagcagtcttaatacgagacatctgttctttggggaactcgtcctcatcttcaacttcatcatccagagcctctgcatccttctcttccttgatgcgctgggcctctacgaggctattgtaggtacccttgcgatcgactagttcatcatgtgtaccctgttctacaatcctgccatcgaccaagacaacaatattgtgagcggtttttatggtcgatagacgatgagcaataacaatagtggttcgaccttctgcagctttatcaagagcagcttgaacaactccttctgacttggtatccaatgcagatgtagcttcatcaagcaaaagaatctttgggtcgctgacaatggcacgggcaatggcaattcgctgcttttgaccaccagatagcaagaacccgcgctgtccgacattggtctcgtacccttctggcaaagcactgacgaagtcatgagcattggccattctcgccgcgttctcgatcagttcacggatcttctcatctgattcgtgctcaaatttcgtgccaatgagtccatactggatattcttgtagatcgtagtgccgaaaaggataggttcctgactaaccaacgagatttgctgacgcagccaacgaaggttaaggttctgaatgtcataaccatctaggaatacttgaccaccgacagggaagtaaaagcgctcgaccaaccctacaacagtactctttccagagcctgaaggacctactaaagctgtggttttgccagcaggtatttttaaggaaacgccgtccataatcgtcacttcaggtcgtgaagggtagatgtgtttgacgtcgcggaactcaatgttgccttcaacgtgagagggtgtctctccttcatccgagtacggatccaatggtgaaggacgatcaatggtagtatagatcttggctgctgctgctacagcattcgtaaatgcttgagcattcgggctgacgtttcccagactgaaggagcctatcaaaatcgccatcaacacagtgaggacctgaccaacattaacctctccgttaacaaggaaccgggagcccatccagaagccgaggccatagttggagaacatgataccaaacattccgccaatcatgaagccaagtatgagttggttcttgactccccacttttctgcttctgccaggtgaacctcgtattgcttggcaagcttatcctgagtgccgaatgcagtggcattccgaatggagctgatcacctcctctgcaacggtgccaccagcaccataactatccagagatctcttgctgtacttcacaataaagcgagacccacctcccatgaccaacacaagggcgacaatcgtcgagctgcaaatcagcgccaacttccaatatttgacatacgcaacaataaaagcggtgacaaatgtggagatggccgtaagtgtaagtccaactttctcagagataccgtcctggataaggtttgtgtcggcggtgatgcgcgtggttacttcaccagcacccaatttatcaaaataggccatgttttgccgcaggatggactcgaggtaatgttcgcggatcttttggctgatgtgctccccagtataaatgaatccaacagtgctgatatataccgtgacaaattcagcgatgccaagatatacgaagtacaagacattctttgtcagttggtgataaaattcatcatatgaaataagatctgcgaccctatttgacatggctgaggccaaggaaccgaaaaggatctaacgagtggtcagtatatggttttagtgtaagggcctagttaagacacactgtgaatagcggtagtgctgcaccggcagctatagcacaaatcgcgcttataaacatgatgagtatatccattcgagatgcatagcggaaaagcgcaacgaatggcactttcctttcgtccgcatcgagctgtttcttcaatatctgcttctcatgttctggtaggtgggaataaagagcatcgtcatcatcattattgtcgccgactctatcactcttgtgggaggatgaaggacgggtaccctgttccttgcccgctggcggagctatcgttgaaccggaagcagaattgctaatagacttctcattttcgatagcagtagctggagaagagccaccagctttctccactgaggtcattttgcttgaggaagcgagactgagttcgcagtccgtaaataatcgcgcaatggtcccagtaataaccctactccatgaggaagatggatgaagacaagctcggattaattcgcctgttatgagccgccgaagggacggatcgtcagtgaaagggctgcaaatgtttcgaccagctggaatgttggacgcgcgatgccttatgcgcgcgaacaaggaagggaggaaggaaaggggggcataaattattattccaagaagggtacgaaagggagaaaagaatcttttgagttttagaggctaccgttgaataaactatataaggatcacaacaaaggaggggaaagggaagtgtcaatagagtgtcaaagggaggaaggggaatatttgagagacctcgacgtatttagttgcccgtgagggtcagactagtacatacctttttggtgctatttatttaatcttgatctcttatcggagtcccgacatcccgaagcgttttatgcaggcttaaattaaccacatttagccacttcatgaagatgggtgggacagtaataaaagaaaaagagaattctaccgacccttaacaattgcagtgataagaagcaactcagctaatcataagtctcgctaaagcatttactgaggttatttttctagtagtagccaccaaggcttgcataggcagcatagttgacgggaaaaaaaaaaaaaaaggcctattccttgttgcttggaactcccaagaattctggtacgtgacgtacctacttggagaaggcttcaaagtagatcagataggttaaaacctcggcgtcccggataccatgggcccacgggtccgatgaacaaatcaacttctggattggaaggtttcattgagacctgttaaagacatctgactcaactcagcatcctccgagattactagttccatagcactactctctacggtgtaagtccacctcggaaatctctagaaaagtaaggaaagctaaaaatacgacgcatgagtaattgaccatggaccagattatgatgttgtgatgggtgcctaagatcaggaccaatggccaagcttcaattatgttagaagggggtcccgctttctaaacgatgattcatacggagtacttaacgtaatccacgggcgagcggccatcccgggcgagcggccacgtcaaccaatttcaaccacgcttgaagaatctatatatttcaaccaccaactatgccaccaaaagcagccagaaagctaaaagattctattgaacaagaaggtagaattctactagcaatttcagctattaaaaaacaagaaattcgcactatagctgaagcagcacgtatctataatattccacgtactacccttcggagacgcctgaatggccatacttttcgagccgaaacgcgcgccaatggccataaattaactcaaaatgaggagaattcgctggtacactggattctatcgctagatcagcgtggagcacctcctcgacctgctcatgtacgagaaatggccaatatcttacttttaaagcgtggttttagtgatactcctactactgttggtgaaaactgggtatatacttttattaaacgccgtgaggagttaaaaactcaattttctcgccgctataactatcagcgcgctaaatacgaggatcctaagcttttacataagtggtttgagcgcgtacaaatcactataatgcagtatagcattcaaccggacgatatctacaactttgatgaaactggctttgcaatgggcttgatatctactactaaagtagttactcgagctgagttagctgatagaccttttcttctacagccagggaaccgggaatgggtcacttctattaagtatattagctctagggggcctcttccaccttgccttatcttcaaaggcaaagtccatattgagggctggtacgagatgggtctaccatcagactggcgtatagaaacgagtgcaaatggctggactaccgatgagataggtctacgttggctgcagcagctatttataccttttactgctggccgtacggttggtcgatatcggcttttaatactcgatggtcacggtagtcatttaacacctcagttcgacgatatatgcagtcaaaacaatattataccactctgtatacctgcgcactcatctcacctacttcagccgcttgatataggctgctttggccccctaaaacgcgcgtacggacagctggttgagaataagatgagattagacttcaaccacatcaataaacttgactttcttgaagcctttcctcaggcgagagctcagatatatactactagtaatatctgcagcggtttctcagctactggtcttattcctttcaatcctaagcgtgtattatctcagctaaatattcagctagaagcaacacctccaggtagtagacctagtagtaggtctactaattcagtgcctaaaacgcctcataatctaaagcaactacaaaaacaggaaactacactgaagaagctgcttagagctcgtacaaagagccctgattcgcctactaagattgtgataaagcagcttttcaaaggctatgaacgagctttaaataaagctactattacaaagcaggaagccagagaactacgcgccgcgcatgaaagaatacttaaaaagaaaaagcgctctactagacagctgcctatagaatcaggcgcttcagttcaggaagctcaggagcttatacaaggcagaaattctactatagagcctataactactgcctcagtagatataggcgctccggtagaaagccagcgtatacgtgctccaccaaggtgttctggctgtaatatactagaacataaaattactcagtatcctaatcgtcagactatttaaattttttatagaaatgcacatttttcggtgttttgaatagcttcatttctaggaggtgcgtagagttctggtgtggtggccgctcgcccgggatggccgctcgcccgtggattacgttaccgacggagtcggagtgcctaaacctctagagtctagcctctactacctacttttagagcctcccaaggggtttactaggcaattttgggcaacgctatacgagcgaaccaatcacctcagaactcttttcaatctcatggcggggttcggggtgttgctgttcctgggaatgacagacaggttactagtcgactccgtagcggcgtagatggacccccaagcttagttaaattatggttgtcggacattcggggtctccaattcccgacaacaggaattaataactctgagttcttccatatcattggtttgtctcttgaggtcggctacagtacttagtatgctgaatgggggctctgactagtacctagctgtactccgtacctactccatagtacctacaaactttttccgtcgatcagagtaaatatgtcagccggtcgcgtgtagggttcgaataacccctgctaatgtgagatgttttgactcaataaatgtagcggctggctgttctgcatagtggttagccaatcttcaagtgctatcttacttttctctgggtaatggaatagtaatgtaaagaaagcgcttgagatagatgcataggtcgtacagcctgttgccactgctcctcgaactaaagaaagaaacaaaagaggaaaggctccagcatggtaaagtgtatctaatcaatcgctcatcctcgtctgtacatacaccgccaatctagggaacagaagacaaaataaggctttctttaaatggtcaggaatcggcagggagaaagagtggcaaatggtaactgatattatcgccctcacaccctaaaacgttaagagaattgtgcttcctctcccagttacaacattacttctaagtggcagatcttggaagattgagcatcagggactcggtatagttaattaactggcatgtcatcctattcaagcatattatgtgtattgcgcaataatccagataagtagcaagatataaacccgtcatgtggtgattgatgagatataccatattatagaccagaccaaagcgctgaacaaccgtcaagagtttcaccagttggttgtaagtctcggtcctgagggaaatcatgcctcaggctcaaatcacatgaccttcccgaagcgaagcgctaagccctgcccgcacaaaaaaaccactactaccagaggcccttgaagacggtcgacaacctcattctcgccagtccatacactcagctcgccgtcgcgacaagccttcaagatgccggttagcaacccctgaagcaaacctagagtctgtactcgggtgatatttttccacatcatttggtcaaaatggatgggggggcttatgtgatcgctgctaacgctcaatttcttcgattagagccacaagagtttccgcaccaagcagaagcttgccaaagctcagagacagaaccgtcctatcccccagtggattcgtctcaggaccggtaacaccatcaggtaattaacacctattcctttcaggaccctcgatcggctggaacagtggcaacgagctttgaaacgtgtatggagttgacatgctcccactcggaatcccgtcgctttctttgctacttggagcggaggaaatatctacttggattttgagctggacacgtcggaaggacatgaacgtgctgacaaccgaaatcctagatacaacgccaagcggaggcactggcgcaagacccgtctcggtatttaaatttggaattcctccttcaaccgggatgtttatccccgattgtttcgttcatctgtgataccgaaaacgttgctcgcgatgattaatctgcatcctggatccggcccgcttcaacatctttctctcgccgaactttgatctatgctcggaatctttggcaaatatatctcatcctgatagctcttgagaaactcaggatgatttacggacaatgatcgaatcggaagcggtgacgggttctgatagaacgtactttgcaaattatgtacacgagctgagacaaaataaaaattatgatggataatgagcagtgaacgaagattttttgcaggaatatctccacatatcactccttgaacctgaagataatgcaagggaacatgtcggtgaatggcagttatctacggactacgttacattttacctctctatgatatagtacgcccacagaagtacgtcctagtacttgcgagctgggttgtgtagtcggtttgaggaacggcaaggatgggcgaacgttttgggacacaagaagccgcagcaacatatcgtacttatgcctgttgtagtgtaatctcacgtagttgtatgtttgatatagttcttgcagtggcccatacctcttaagacagcgcgttgtcattttgctctcctatctattgcgtcatgtactcttactacgtaggtctctagtctatgcagatcgaggtaattacttggtgttacgtaggtagtcaaaggtattaaaagtcctgatcgcatattcacaggcctcaaataatgatattctttttgctacaacagctccctcaacaactcagattcagtgggtaatccggttgtcgaactgcctacgtctaaccctagccttcaacaaagcacaaccagctaattgaaaaggaaagcgatggtgatataaaattcctaacgccatagagtagaaaagaccaatggaccagatgaaactcaagctgaaagattatggagaactgctagcctcccggaacagatcatgaaacttgggcgggatttcaagagcaaggcaagactaacatcggccagaggcgtatttagcggctatagcagagagcagttagcattccggtggtattccagaggcgggcaaattgtgcaacggttaaacaagggaaactttaggcacttactcctctgcccattcattctcgcgacgaatctgatcctcctcctcgggtgtaaaatcgttctggatattgaaggtcttacgaatctcctcaggagacttgcccttgatcatattcgcaacggtcttgcagccaacatcaagtagtcccttaatgtcaaggtagttggcggcctattttattgggatctagattcagaacttctatcaagacatcgtaaacttagatggtacgtaccagaattatttcgaaaagcatttcctgatcaacctgcatgaacttctgatcccactcgtcgatatccgtagtcttgcggcgggaatcatcgtcatcgccggtgctgggagggtcgttcttatgatgggtgcaccattcaatgaccttcttcagaacggcttcgttgacctacagcgggtaagtgagttcccatcatgtaaagttgactgaaaggtgagtctcatagctgatccaagatgactcacgttggggataggaatgggctctccagtttcacccaagtcttcgagcatgttcttaatgagctgcgagcgttcggcgacatcacgttctaaatgacgggacaacagatcagcaccgaacctactatccaggagatgaagagagaaatcatggatctcttcttggtaaaaggtatcgatcatgatgaatgcacctaccgacagggatgtcaacgccgtcggagctcgtgaaggttagagtaggagtggccatgttgagatattcaagtcctaagcagactgttaaaacctgaaacaattgtcgccttcgcgagataagtcagcttgttttcatggagtgctagaattcggaccaagttaaatattttatgaggggtacagaggtggggggatgatttaccgacactggtgactgtgagagagtttcgaagagagagaaactgggttgtggagagaagattggggtgcgaaccttgatatatgtgtctcgggacaatgaggcagaaacagaataaaaggaaagcaagctcaaaggggagatgtagcggtgcagaaatagaaggtaggaaggaataacaatcaatggcagagagtagtagtgaggcttagttatacagggaacatttagcgcttagtcggtacggagatgaaagcgtgggtcataagtacttatttttccttacaagttgtacggagtctataagtaataaatattcaggctcaccccactgcgcagtggcgcctagattgccgccttgttgttgcctcagcgtatttccacccagtaaacctatataaaggatacttactgtacggagtacataccagtatttaatacaaagccggtaatttggaggaaacatcaatctgttatgggcttttcccaaatcctatacacagcattcatatattcccaaatgaaggagtagtgacgttctttcttattgttcatcatcatgatatctttcattcaaagaaatttttctcttcggtctcttctgtatctaggtttaggacatcaggtgcatcgtacaaaaacttccaatgtatcgcaacctcgacccaccatcattcgattcatcgccagctaatctaatttaaccaccactactacattttaactagtaattcagcaatggttcctattaacggcgggcagtgaagtcaccccaacatgtccctctcacccagtccgaggagataggtcttgcacatcagcaacttagccggaccgaacgaaccctcctaagagtcctgaacaagcttccactccttgattctctccgataaccttgtctatatgctagaccatgtcgttccttgaattttgaattattcaaatgtgggacaaaagcaacagcatgtgctttgtttatagaaatttttggtttccttatttataattttccgtgtcttatcatcattattattgttacacttgaccatcggagccatgtggagacgaacatatttgcttctactggtgatccgtgtttactttgccctttccccaagctaccttcatccagacgagaactttcagggacctgaagtttttgcaggtaagcatgctattctttctttcaagagctatctgtcgatgcgaccattgttttatcgcggcggcttctttctgccggcaggtcccgcgtctcattgattttgatggatggccatccgacgaccaaaacctacctccacaataaaccattattcataggactcaactaagctccccaggtcgcgtcctctcctacccatccaaattaccatgggaattcaccgccgataaaccgatccgcagcgtctttccgctatggccgatctacgacgtgccaataagccttctgaaatggttctatgccgaaacaggggccccgacaccccctcctccacaggttatctactatgtactgcgaggggtcatgtttctcttgggttttgtgctggaggactgggctgtatatgagttagtcccttttgcgcgacaccgccgggcaaccgtggtgctggtcgcgtcctcgtatgtcacctggacatatcagacgcacactttctccaactcccttgagacgttgctggttgcttggggtctggtcttgattcgccgcattgtcgtgaataaggtctgttcgccacaccaaagtcaaggaagagggaatgtcggtaggctaatgttcgtctatagcgccgctcatccgtcttctcttgtgctgtcctagcctttattgctgtcgctggcgtctttaatcgaatcacatttccagcttttcttgccatcccaggacttcaattattgcctcattttcggcgcaagtcagtatccccgtgagaatggtgcttcattttaatactaaaccatccttgaacatccaggccggtctcattattttccttcgtggggttcggtatattcttctttggaatcgctgttcttgttgataccgccttttataggccttctgcaaccctgtgggatgcccttcactcaccgataattacacccatcaacaatttactttataactccgatagttcaaacttggcacttcatggtctccaccctcattatcaacacttcttagttaacttgccgcagctccttgggcctgcatatgctatgatggctatatcattgtggggcttgccagtaatcccaacctggctgaagaacgcgcgtgctgtctccgctttatcagcaactgtcatattgtcaatcttcccccaccaagaaccgcgcttcttaataccatgcgtacctcttctcctcagttgcttccgtgtgagcaaatcgcgtttattcctggccgtctggatgatatttaatgctgctctggggtttttaatgggtatttatcaccaagggggggttgtacctgctcagcttgcaatgccctctatcatctcagccagcagtgttgaatcaaatgatgcattgccaggagaaatccctgtcgtctctgccacagtcttttggtggaaaacttactctcccccgttatggttactaggaactaacgacaattcatccctgaatatcgagactcgagacttaatgggcgttcccggaccaaacttgattgaagagctggaaaaactactccctccctgcaacgttgctggatcgaagcaagctggctcggtattcgtggttgcgcccaagtcggctgctttccttgatcgatatacctttttgccgagttcgtcgtcggttagctcagctctagagctacacgaactgtggtcttataggaaacatatcaacttggatgatctagactttggcactgaaggtgtctatccgacattgaggcgagtgattggtaggcgcggactggccgtgtggagagctaaaagggcggggtgcaattgaagctggaccatctgatggcgttactatatcagatgcctgatggtgtattgagatgcctgatagtgtaaagctaacaaatttcgaaccactactcctttgtcctcttctcaccccttgtttcgagaattctgggttaagcgacctcgatggtcagcttctagctcttcctaatctcctgtacaagatatgcaactgcctctgattcacctatatacccgctggtgcaggcgatgggcagtgatgggcgtgtgtatcgtgtcatttttcggtcgacttatacccgttatagcaaaacactgcacacacattctggcctttgtgaaaagagcaaagtgtcattttgatattactgagcgcatttgctgatccggtgacgtagtcagcgatacttaagaggctcctcaaacgcggcatgaggtcacaggacacattaaacgtatagtgctgtagataggtactagtactaggtaggtggaggtaaagtggtcatccccatgtttaatgtaccaatcaacgagcaaaatggagactggtgctggtcttagccacctggaagtatttatttcaactttacgaaaccgggtttagttttacacctcgttcatctcacgcgatcatttttacaagtgccgcgggggggaaagggatacaaagatatctcatttttgttccattaactaggcacacgaccaaaatgtcacttctgagtaagacggtgaatagaagggaaataggtgaagactactaccatatgtgagaataccgctacagatgttgtccatgagatagtggtaaggatgagaagatgtgactgaggaaagtagtggcagctagtgtttccgcgtgctgtgcacggcaagcggcacggcaagctgtaccagtcatgataaaacccggcttcggtaaggaactcggcaaggagatagatgcagcagttttcattaaggggaaagagcagcactaggttcgcagcaaatgtattgttgggaagccttcgacggggaatactctggcgctgaatcattggtcttcagggtcatcagtgttctcgaatagaaagttggcagcgagctcttcgttcttgtcacatgcaaagtaagcctctatgaccatatctcgggaaaatcccagacggcatagctagtactggattagccttcgacccggcgtgaaattatgcataaataagaggcattaggcaaacgtacacgttcgatagcatctctctcttcctcggtgacatggatctgatgcgtaccaggagggagggcaccatcaccttcttcgctcaagagctgaaggaattgctcctcgttctggccgatgagctgggcgatttgagggttaccggccgccacttgttgaagaatgggttcgagcatttgcggttgctgctggactagctggcgaagttgctggaaatgtgggttattccgaaggaagtcgagattcggaagtccttcgccggctgcacttccggagcgtgccccatggggaccttcctgggtacccgcctgagcagcagcctcaaacagattgactggttcttcaccaccagttgtcgcaggagcgtttcccccagcggaagctgcagggggttgaggcgaagcagcagtggcagtggcagcttgttgttgttgttgttgctgttcctgttcctgttgtatgttttctggaattccctggtggttgttatgagtatcatcagcggatgtgtatcgcgcttaggcaacgttaatgtgcaaatctcacattcaaaagatattcaatagcacgagtaggattgaagaaagcagccctcatagcgcggttgatatcatcccttggaaaacccatactctccatgtgagaaataaccgcctcgccctgagagccactcagcaaagcggagggatcattgaaagcagcgtcggatggctgtgtagccgcagcaggggaaggagtcgccggtggtgctgttgcggaggcgtttgtagatggagccggggcaggaggcgcagctggggtcgaggtggcagctctcgaaggcgtcgagggagcttgcgaaggcgtggctgtagacgaggaggccttaggctacacagcacggttaaatagcttaatatataccaagggacgccattgtataatttaccttggagaccatgcatactatgaagcccttttcttcgatgttgtacgattcgatcgccttgtcatcttgcaagatcttacctgtaggatgaaaggatggttagcgacttatcatgtagcaaaacttagccaagtcatcatatgtgacgccgacgtggtgaaaccataacgggcaagacgccatggacgaaccggagtagatcagtttcagttgggggacctcccagcccttctccttggagatcttttctttcacttgtccaacctaacggagattttattagccccgcattgacacggcgaagatatcggcacctggggttattaccgtctctgagggctctgcatcaattacgaacttctgctgtttcaagtcctagagtagagaagagatggttgttagcttcagtcattaatgaacaggcggggtgttagagatgcctactttaaaggtaagcttcatcttgcgccaccagaggagtgaagatggctagaaaaaaagttggatgtttggaggcacagaaagatgtgagtatggtggtaagtacgctgcccagtccttgaatattggaagaggaaatagggggtgttagattagagaactgaggaattgccaggaagaacaatgatgatgacaatccatgacgattttggggggggaagaggagcagttggcctggaggcggtcacggcatctccgtcaagccgcaccttcacagccacattaaatacgtccagccacaatttcctgttcgggtagagtggtttggttccataggtatatagtagatagctaggtggcatactatttcaacaagagcggcgagaatgggctttcactttcatggcctaaaatactatcaaaaggtacatacactatttaagaatttccctgctgctcaagttggggtcggcgcgcgccggataagggttaaactgtgcatacaaggcgcatacactaaattgcggaggattcacaagcaagatgaaagttaaggtcagggtcgttatgagtccaagaacgaatttttactacaaagagtcattggctctcatcgtcataaggatgtctgaatacgctgccagcggccaggtgaccgccatatagtcagtctacaatatttcgtaatatttacggagtacatgagtgagaggccatttgcacaagggaaacgagtagacgataaattaaaaccacttgcatcatcaacaaccaccagaaaaaaattattgagaagaaagaggagggaggagatgagagaatagaacgattcaggcacacagtgtgtaggaataatgtgtaaatttctgattaacttttcttgcggaacggggcgcacctgtgatatatctcttggatctatcacgcgtaattattttcgccagaggaccattcacacatcccccatgtacactttgtaattcgaagcctactagcaacacatctcccacaagacttaattatggcaacgttggtctctgaaaatactaactataaacagacttcctattgccattgttgtagtatctatagtgttaatcgaacaataacaatatcattacctgtctccagattcttcagctcttgacccagtccctcagataatagatatatcacatctatgaatcggggtgtttatcgatattatccattatcttggaatgtaactggacggtcagacctttaagactgttccggcaacctggagatcgtcccgcgtatttcacccatgaagccaccaacccttgacaaattcccttctggacgtgttccacgcgctagcacatcctgtgagaaacatacaataaaaatgtggttccaatgattcttactgactcagaggcatattagtgatgattgccatgggtgcaaactacttggctgttgaaagggatgcatcaacaatcagtcccatcatagatgaacaagatttgttatcctgtgcgaaacctaggaagtgactagttctacatacaaggaccagacagcttcactctggtggttgagaggccttgtgtcattccaatatatagggcctgagcaattcatgttccaggggagggcttctcttttaccctctccgtctatcttttcttttctttctttttttatttttcatacccctttggtttctcacttaaaataggagctatctggaattctatctagaccttctaacgaaagatagcgcgatctgagagtcccaactaggtggcaccgagatctacccctgtcactttagccgtagtctttgcatatgcgatatccattcggactgttgtatgcgtcccaatgcaatcacctacggggaacttcttccccccgctgccctctacctaattttaaatagatagacttcaggctctcccgctacttttggatataaattctcgctcggacatatatctttcttacttccacagtattctagtcacggtttgatctcatactcacctacggcctgcccttattctatgctttaatgttactcctacttcatttctgaatggcatccataaaactgccatgaaagcattttttaacccttgatgataccccgggctcctttgtcatatactgtcttcacctacaacatacaccatcttaagctgtttcattcttcaagtacagcgaccctatatacactcgaatccgacaccgctgttcattggatcccttggaccttggtataccctcgggtttattccttgacgaacgcctacgcctgcttattttccaaccaccgctatgaatttcaatgtggctcgaccttctctgccatgcgtactagggggagcatccttcgcgctaaccacagtggtcaccattctcgacggtttatgcttgacatccttcaaaaacttctcgtttaatgttcgctcgatcgaatctgccgtcacagccctgagcggagcgaactgtattgtactcattgttacaatcttattttggctgacagatatcaacaatgagaatataagacaattaagcgcgtaccgaaggcgcgtatattacaccctgattgtctactcagctatgactacaggagtgactgccggaggtatagcatggggcacgacacaggccattatagagcaacagaaaatgtcacttggtccaagacaacgactattgctggtgactcgtattgtcatatgggcaatctctgttcttacccagggccttttcggtgggcttctcctaatgacactagcagaacagagcagccgcagcagatggtcaacctcgctatctcacgatcttgatgccctccacggacatttagctgaagacaacggactggagtcaacaaagcagccgcagcttgtagttgactcaccaaaaaaatccacagatcgaaagcggagctgtgatagttcgattgcgatccagaaatctacgtcatgtgctacgcgctactcaggccgaacgctataccagcaagattcaaaacacagttctgttgatctcaatccgccaatagcctatcctgaatgcgctgtaatgcgcaatacgttcaatggctatctctacggacataacagttacgctgtgggaggcgatggcgacgctgggtcacgcaaaatgcaggggaataaacaagagtttgggtgctctttggatactctgcgacggcaaacttcattaaggaggtcatcggatacgtcaagatcacttcagccagaggttcccagcaagggtggtcccccaaaactaacgctatccgatgagagtaatatccatccactttttcgttctaacagtccaaccccccctcctacagctatgcctgggaccaccgttgttgcatctccggcggctggacaaatcatctctatgaaaacattacataggatgaaatcgaccaattcactccggtcctacactccacgaagtcggtcacccctgtttgagcgaactggtcaagccggcgaagaaatacattcaaaatcagggctaagtgatgggcgatgtgagctcaacaacgaccagacattcacaataccaaattttgtcatggctgcagatttgcgaaggagtataacacagtatgaaaagaggtacgatttgatagaatcccccaatgaaagttaggggtcggtggtttcaacctgaagatgtcattgacttatgtctttcctttgtcacaattatccttattttgttattagatatcccaggtgtagtacgtcttttgtgattagcatctaataccaatgaagaatctctagaagcaactgagtgataataagaatcccccctattcgctacggctcgatcttgaacctgttgtgctatggctgccatggcatgaatcagtaccgtgcatagctatattctttctggtcgatatggttatacagagtaattgattcgaatcccgctagtaagtatcatggcaagccctttccagaattcaacatttagtcaatgctcagaggtttgtgtcccaatgccgtctcagggcaaggatcatgatgcactgtacaacatcctgtaacaaaccagtttcagcatacatagatgccattaaatattccagccgtgctctttgagatattcccagcaaatcccatgatatgaaatccctaacatgattatgcatgactgatgacgatgctatctatgtgggtcctcctgctacgcagtcaccaatacgttgtgatggaactgacggtgagggtggagctgcatagttgtatgcatgttaggctctcatgatattattgactttactcatttcgcaaaaccagcacaatcagaaatatcttaagacggtgagagggcatcgaagaaatttgctctgacttcttaacatggtgctctcgtgcgcagctgcaacgggtttgctgatagagagcaatgacagcccccacctcttttctgctctttcctcgcctaaaacagttatggaagggcaccgcggtgctcttgcatattcatttggacgttcagacctttcaccatttggaggttcaagcaccatagtgcttaaggaatttcaaatcattgaagaatatcctagactgtgttttagggataaaggtaaactaatatatacttcatatcaccaaaaaaaaatagattccttgatacgtgtttcagttcacgatctaatacatatatctgtgctcatattttacttcttggctcaatgctttggctaatgtttcttatttacaattgggacaagatatatcggtataggcaagattaaacgtttctcgaagtagttactatcgctgaaccagtcaagatagatagtgttgtagcttcatagaatggatttcaaaagtctgttattgctttcaacaagggcttccaatgattttaggataattacccttcacaaaaaatctaaaatcgatgagataggatacgtaggttgtacctttggcatagacggtattgcacgcgaaaccatttttttttttcttttttacatcagcaggcaacggaactagcgtgcgcaaacattaccataccacgagtattaccagatggactaacccgagtaggatgctttttctggttggactaacttccagtagggaaagaactaaaaaactacaacttattatcacccttgcataccacaaccccagatcgtttgaggtctcctctatctcctaaaccatttatctgcgtcgggattccattttcacatacgtatttttcatctcttccgagtggattgaggggttgaatataggaagaaaggcttgttttcttaacagttactcacctacataacctacttgctctctgcgccaccctgccctttggacttgagagacccagtcaaatccttcggccaacccggtaatacggcgaccagaccaaacctcttactcaggttggcagggcactgatgtgtacctctctagaattccttttcaccttccatacgtactattcagccccgaagttgtttgatttcgcttcattttccctctcccttattaacacaaagagggctctctacgtgtttcttccccctagaatctgaaatcctcttttccttcttcatctctttattctccattcctgttcatcccccaccgatcgagccgtttcgagttcccacctatgaagatcaacacacctggtgtacaaacagccttcgtgatctgattttcccctctagtatatcctcgtctccctttctcccctcgaccctgattacattcttcggttcttcttttcttcttgtaaaccctattccccctcaattcctggtactgccggagctctccaggttcctcgtacaacccgttctgctgcttgacttactacttccggcgactaaattctactttaccttttctcgcggtgatccacttggccgaaccactttttacttcatccacttactacttactacttcactacttgcaacaaccctctccgtcctgtcgcatgcgccgttgcatctagtctttgggtaagttagctttcgccagcattcttcattggcctttctactcttgcgctcatctcatgttactcacccaatcttcccacctgcggttcttcctcaattaaaatgtgctcttgtcgcctgtaacatattcacccactcggtgcttctggccatttgctcatcgtgtccgctcaagcttttcacgctcttgatcggtttttatcgctctgctttacccttgtatgatgacgcccttattgtcgtgatgacctcgaattgctatctgttcttgatccccctcctccctcatatgttcttatcctctagtatacgtgcgttacctttcagctggctacatttcacacctcttgtttctgactgaaccttcttgtcaagatgttggcctgattgatgttgatctctctccgtcctccccttctctttttccctgttccttttttactagctttttgttggagccttccaaggagctatttcgtgttaaagctccacctcctcagctaacacttagaccttctcagcaattcttcttgtgagcacgcccttgctgacacccgaaaacacagaattgcgatggcgggcatcaaacgtaaacttgactccaccaaagggtcagctgcagggcccaccggcagcgcaacaggcgtaggagcccccccaaagacgcccagtaagtattacagagcactgctatcatctttcgtaggtactaattgctaaatagactctacggttggtgatactgctcatatccgcgtgacacggagtctacgtgcaagtcaagatgcgcgggcaaaccaaactgataacaacaagaacagctcaaacaacacaatgcataacaagagtagtaataatcgtcctttgtcgcgtataatcacgctcagtacccgtgctgctcgagccaacagcgctgcaagaaatgcattgaacaatgcagcaagcaatggtacgaatagcccatcgaatgctgctcgcgagacccgggcttctcgaacccgggctgcagcccctgctgcagttgcgccacccgcggccgcaccaagtcagtttgacggaacaaccttgaatgtgcctgaaaccccgcggtctaagagggtcagacgaggtccggtagtcgaggaaactccaagaagtacgagacagtctgctagactacggtcccacgtcaacatatctgttaacgagaacgcctccgctgaagcagccattaccaaacactttgaagcaagcccctccaagggggttactcctagtagtaggactaggaatagaagccgacaagctgcggatgctgcacctgacactactcaaagtagtgtgaactctaacgtaaccaccgatatgaggcatccgtccccggaagacattattccagaaactgtcgaagcatttaaacaaacagaagacgatcaagatccgcatgtatccatggaatcgtcccaaactgtaggggaattaccgacggactccacgcaccaggagtacaatcatgaaactgatgatatgaacatccaggaggtcgagggtatgcctagtcctgcgaagacttcctgttcatctggttctcgaaagcgcagatcttcggagccagaaaacaaaggaactacggagtttactagtattcttgatcttcctcaccaaaaactgaaactcgaggatggggagctcgatcatacggcagaacagcctttacagggcagtgccgttatcaaaaatgtgtcgcgctcccccgacgatgaagcggaagaatctaaagttggcgatgaatcccgtcaaatcacagaagatattgaagaatcaaccccagagcataccacagaacccataattgggaaggcagttcgtggcgggcgtagtcgaggacgaggccgcggtgggcgtagcagagctgctgcacgctccggctcaagcaaacgaggtcgtggcgctgctcgtgctgctcgtggtgggcgcactgggcgccaatatgatcgatcaagtgatgttgaacacgaccgttctccttcccctagtgcagccacccaaaagctccgggatcgacaacgggaactggacaaagcatttaggaaggttgcagctgcccaacgattggctttggctgttttagcttcacagtctcagaaaaagctttcccgcgataagaacgctcacaaaattgtacctgagtatgaagaaattaactcactcctaaagacgaggctcgacaagaggttggaggttttccgccatgaatatgagctccgagttgagcaagaaaataggcttttcgctgctaatagagaagcaatcgaagaaagatttcgagtaagtctgacacttcatttgatactttgcttttttggagctgctgttgatgacaaacggttacaggcctcagctcggtatatcaaagaggaacatttctttgcaagtcagggagaatatatggcatttgtggagggccgacgtgctgcagaggatgatgagcacactgaagtatgccagcttttgtattcaggatcgttatgcaaatgcaataggctaatatggtcccagactgatggctctgaaaccgagcctgagcgtgttattccacctgcaaaagaagtcgtgaggggttttaattcttcctttgtacggaatcccgctggtgctgcttcctacgaccgtgctaggtatggctgggatgatttcgtccagcgtgctaagttaggcgatgatatcgacccgcagatgaaggagatgagggaagccggaccgtttgctggcttttctgcccgagaaatcatagacctcttactagaggcgactggtatcgttgaggtgcgccagaaagctagtgtggagacacagcgcaagcctgcattccctgatacgcgcccgacagccttattcgcattggctgatgtggcagccgctgagctccctcgtcctaccatatcccaaaccacaccgcgactttcggcgcacagagctctcctcccgcagccttcacaggtggctcacgggccgacagatcctcgatcttttgtgctgcctccccccacaccccaacggcaacagccccgtcggctcctccctgccgggcagcaaattccgcccatcagtgagcaacttggtctcccagatccattcgcgagcaggggtggtcctccacagcttcctcctcctccggggtctaacttccaacggcctccactacctaattatttggcaggtcatcatccacagagtttgtattatccggcgccaccgccgcctacagctccgccacctcctggtcctcgccctccatattagagagtcacacatggacgataggaccttctgttcgttttctcttaataatgttctgttgtcttttgtccaatttcgcggacatgctatattctttgaatctgttagggtttgatatacggagctacggtctactcttaaaacagtaatgctggttcatgtcgggagttatgtgctggttgggtggtagttctctctcgttgcctcttcttcttttgttgattttatccccctgattcttgagaagattggagcgtggacttgatgtaatagttcaagatagtatttatagtggatgatggtatcatgcataccctgtttgcaatctttgtatcaatataagtgcaaaaagaatcggatgtattttacacccaaggacagaactcgttaatttaatttgatcgattgaaaatccttagccaaactaaataaataactaagacaaataaacaaaaaggaagagggtggattgaaggatgaaaatctgacgagagtgaaaaagcagacccacccagcatcagaatgaataatgatgactccttccatgactcttcgccgtgactccgccccgattgggtctagtcccgcgggtggggtggtgggatttgaggctgcttttcctttgcattgattctttttttgcgttgcttcgcaaaatctctcggacactttaattcttatattagttgactgttaaccgtcaattgcccctaccagaactttgtcacgggtgctgttcatcttcgcgcattccctgttctctgtcacgaccatctaacgacagtttctgcctctttatcacccaccccacctgacagcttctcccaccttgcttctcgctttgttcttcgagaatatatcctgcctcttcctactacgagtaatccttgaatttttaaattgaaattgtcgcttggacacgatcgaaatttttgaattatggcggttcgcgcacagtttgagaactccaacgagtgagtggaatatgttgccaagtctttgaatgcgaagtggatgaagaacagagagaatgaaaaaaaaggggtgggggaaggaaaaagaaaacgaaagaaaaagaaagaagcatgaatgactaggaacaagcgttaactgtgagattcactatgcagggttggcgtcttcgctcgtctcaccaattcatatgccgttgtcgctatcggagcctcggagaacttttacaggtgtgtgcggttggatgcaggccccgtagaatagtgaactgacttccgcagtgtattcgaggccgaactccaagatgtcatccccatttgtcacgctactattgctggtactaggattgttgggcgtctaacagcggggtatgtcttaaagtccactagatatttgctctggccctcatgccatagcaccatgaaactcacacatcgaacagtaaccgtaagggccttctggtccccacaaccaccacagatcaggaactgcagcatctccggaatacgctcccagactcggtcaagattcaacggatagaagagcgtctatcagctctgggaaacgtcatctgctgcaacgaccatgtcgccttgatacatccggatctggagcgagaaacagaagaaatgtactacccccaccaccaccattgcttcttgattactatatggcatggaatgaaagtgttgacaatttttaccagtatcgccgacgtcctcggtgtcgaagtcttccgacaaactattgctgataacgtcctgacgggctcatacatggctctctccaaccaaggtggtatcgtgcaccccaagacctccatccgtgatcaggacgagctctcctctctcctccaggtgcctcttgtcgctggtagtgtgaatcgtggtagtgctgttgtcggcgctggtatggttgtcaacgactggttggccgtaacgggcctggatacgacggcaacagagttgagtgtcattgaaagcgtgttccgcttaggagagatgggccctcgcggtgtcggcatgggcagtaccaacaaggagagcattgtggagagcttctactaggctgtcgtcatgggcggtgttattatttaggatatattcattcagaattgccgcgtataaatgtgtatgccttgtgcgcatacatgtttacaaagccagatgctccttcaccttgtctctaatccttgattacatattgaataggatacggtcaataacgacctggtaatgacctagaatagtacccggtacctcagccatagtcaatatagaaagtgtcctgtacccagggaagtggtatcttatataaggggtttggagcctggttatatgattggtagagatgtccgtctaccaaaacccaacccaacatatactattccgactaccatcagaatagaacgcacaaacgaatctgaagtcgactaattgtacaggtttaaatactcgatttgcttcctgtgttccagtacgctccttcttgctggcatcttgttaaaaagtatgcgacagcagtagtgagtatgaggggtattgaaagggtacataagtcaaagggcaaaggcaaaaagagccttttggagtatagaaagaaagaagaaatgaaaaagcaaaaatgaaaaatagagggtgagtaggcagggagggaaataatgcgaagcatgtttaaagaagtacggacaaagtattagaacctgctagacccgagcctaacataaatgatctgccggatcaaactccttgaacaccagcccaaaatgctgataaaaatattaagttgcttttttaaagggggtagctcgatattcccgttatcataccttcccttcgatctcaggttgagatgatttgagcttgttcatatccgtaatatactcagctctagatggtgattgatctatggcgtggtccgtttctggggattcactaggcatttcatcgtctggtggagggggagggggaggtggtggagtgaactcgttgttttcactcctactatcaatatcatctcttaggattttctttgcattatccatgttttgcgggtcgtctccaggactgattggaggcagtggcggcggcgttgaggatctttgtctcttcgaggatgaaatgtactcgcccaagttggaatcctctgcaatgcctccctctctctttcgttttgtacctccctgggtttcttctgcagtcatgggagtgtctttctcatcagctttgtcttcctcatcatcggacatcttcacatctagcgcctcatcgtcacttggagcctgaggcgtttcgaccttcgagtccattcccttcgcttgcttttcgtatttccgttgttcgtaagctcgatgctttaggacggctttgtcgaaaaattccttgcagtactttttgactttcttctgctgcttttcactgatcttcgtagggtcctcaactcggttattcttgaagtcagagttgaccagttttttcgccacctatgcgtaggttgtattaatatgtatgcatcgtatagtttagacaatgggacttacatccttggcgtaacgtttcaagtcctcctttggaagcttatgcttgaatttatccactacatactttatgtgcgggaacaactgatgtaaggttagccctctcgttcatgtgttatatataaattggtactcaccgtattctcataaacctttttttgtttatcttcactgtaacctctccatttctcctgtccctccttcttaacgggaattggtttagatacttgcggcgtgccaggcgtaccgcttttctccttaggcgtgttctccttggcattcatgatgccatcgataatgtcctgcagtgctttgtctctcgactcttttggaggtggaggaggctgaggcgctggcttagttggtctggtccatgtggtatccccacgcgccgagtaatagtatgtccggccattcgattcagcggcgaaccatcctgttggaagtgggttgaactgacgacgaaaggaccttgggccgtgatgatgagggtttctttgtccgtacacccctcgagtttgagctgcaggcccccggggggcctcaattgaccgcgaccttgaccgactgcgggactttgaccgccgtcgttgatcccgaatagtctcccggcgttcaaattgattgacagcttgtgcggtagcattcgggtctcgtttcatgcgtggaatccgataacctacctccagggtcgaccagacttgcagaagtgtagccgccctcttctcgacacgctcgtcaccacagctcgtcagcggctggatagtaacctctattttcgaatcaataatcttatttcgtgtgaggcgcggaaacttatccaggatatccaaaatctgcagcacaacattgaaatcgtccttccacatggtgagctgcgaattgaggatctggtacccatgcattttcaccacacgattgcgaacacgctcgtcatcacagcgttggattcgccccaaaagcttcaccgcgatccacttctcctgacactgcatcaaagccgccataaccttggtgacgccattttcctccaaagacttcggctggacactatccacatactcttcgtcatcctcgcccatcttcttcttgcgtggccgcttcgccaccgccgtatcccagccatctgcatcctcgatccccagggcttcaatggtggcattcgacaacttcgtggcacgttctgtttgggttctcccaccaatgaagcctgtacaattcggttcgccgcaatagcaaggttgaggatcagctccgtaacgatcgacattgtaattaaaaactaattcctccccggcctgaatgtctcgttcagcaaatatgcccatgcggagcttctccccaactacccatttgtcgacatagcagtttggattgcacgagtggttacagaaccggcctagattacccctctttgtcgcatcaacaaattcacctttgctgagggacataaaatagaaatgcttgatcccctcctcgtcatactgcctcatgcggcgccggaactggccttcgttgataacttcgcctacatactcgtagataaactggtgcggtcgcaaatcggcctcggcacgcagaccgaaccctttcttttccgttttgatcacggctacctgggcatactcctttcgttggaatctctgattttgacaatccggtccgcatccacaatcgcccacacattcaatcttggtcgcccggttgatacagtcggaatcttctccacatgccagattttttgagagggcaggttctggttcgcgttaaagtagaatcaagttaacaatcatgctgcgaaaataaggaaatcataacgagaatataaatccaagacatagcgagataaggcctaggggaagtaaccaagggcgtacaaagaaattggcatgcttagtatattgccgctgacgctcgatactgatgacgcgcatttgtacagaaaggtagaagaaaaaggccgtgacttaccccattcttcagcacaatcacattccatcgcatgctcagtatatcccatgtacttgtttgcataagtgcaactgtccatcagctcaaaggacacccgagcctccgccgtactatctcggaggtgcgagaatagttgtggtggccgcgcaacaaccttctgggaggagctgcgagtcagtttaggcggctgtccaggttcttgtttgacagtgatgtcgcccccgactttctcctccatatctgcagtattacttgtctcttcttcttttttgacaggagtttgggaagaggagcgtgattttactgcaacgtccatattctgagcggagggcgagcgggacacgccattggtatcatccttcaatgaggtgcttccgccgttaagagcgggagtatctgtggctctgtcgggctccaggttcatcgcggttaccgcatctgttacggattctgaccgacggtccgcgtagtcatgaggggacatgacgacacggacgacgcgcgccggttattgaagctagtaggcggatgcgctagagaaggcagagggtgtttgtgtgacgtggtagtaggtagtcggcgatgggaggtcgtgtaggtgaagagagagaaaatgagggcgaaggacggcgaagcgatgagggggaaagagagtgagagaaatggaataattcgagttgaacccaaagtcaagtcgaagtcaccgtcaaacaacgtccacgtttttttttcccgcgggcgccaagaaaatattcatgaggaaaaagaaaaaaagaattcaaagaatcaagggagtgccattctcggactgcctccatacgcttctaatttgactggagggggttctctcaagatcttttcccaatttcttattcactattgaatcattcataacctcttcctaactattgttccttacaccaccatgcacttccagctctctcaacatgttgaagaggcatcccgttgaaggactggatagagccaaagagcttctatcagagcgacagcgacagggcaaggtctcttgcaataagcttcattgatttgctggggtaattctgacccttttgcacgcatttcaccatggtggtgtggtagtgatacgtaaaggcggccactactcagcatgacagatgtcgccaaacaccctgtaatctgtcacagttctaccctgcaggtacaggctttgtcaatttctccttctattgcatgcctgttctttcttgatcccttggcctcagtctcgatccatctcatctgggagccataatcttgaaagatagcattgacgagtactaactcaagcgagtacaaacgaccatgtgccttgtagcctttccgaaggagagctaaataagtcagcctccaaaagttaaccggaagcggccttttactcttggaaaggtgaaaaccgggtggctacttcgcgaaatcaaggtgtatacctgaaaaaatcagaatagaaagaaggtgacaaaggggcgaaaagacagggcagagatgcgttccgttaagctaatcaagccgcaatatgtggctacaagctatgcttgtgtaatatgtagatattccatccattcattgggccatctgccactctcagatgggctggttatggagtagggaagccgtggactagtacaagcaatagaagtaactcttagaaaggatttgctctcgagcgaagtctagagccgtcaagagtcaaatacatatttcataggctgtgagtggcccaaatgtaccggataggcctcttgtccatataggtatgacctagctcggtcgagaagtacgtgagagcgcacggcaccggagaccggaggagggatctgcaagaacatcgcaatgatatttagcatgacacgccatgaggaggggtggggttcggatttccggtatgaacctaccctttcagaacaggggcgaagtctgatgcgcatagcgattgggcgaggttgtcccaaattgaagtcagaggtgcattattggccgacatgtaattaagcgagcaagtacgcgacggaggaacaggtaaaaattatttgtgccatcaatagtatttatgataggttgttataaggatgaatgcatgcaggatggaggccaaaccaatctgggcgagttcccgtgcatgaacgggtgttgcctcgaacatgctagagcagagacgctagaaagatttggaaaggagaaagaaagacaggctagaggaaggaagacagagagggaaaaagaaaattaaaatcagatcaaatcaatagaggttgtattatgaaagagtaataacccgcgtgattataacacgataatcatagataatctcatggtcgccccaatgaaagtggaagatgatcaacaggctaatgcagatgttgctctgtaggtgctagtattattatactagagtacacagtactgatatcaatctgtgcgtcgacttaaaataataattagttggttgaactcgattgcataattttgactctcgcaaataagtgtaaatggaagaaggaaggaaattgaacgacggtagggagtaccgagagccaggtaactactagtatccgcgggtactgtacgtatgtacctatgacagtggactgtccgtaccgtaccagatttcaagttactcggtacagagttacaagcgcgccgggtacctgagatgtggggccaaaaggacattccgctttgccagaaagtcaccgagacttctgagtcaacattatacatccgccatactaaacctagttattatggggtatgaaactttaccgcgtccgttgatgaaggtcaccttcatgacaggcggttctggaatttgatatgacccatctatcctggtctgccaaagtctattattattattactattgtcattattacggagtattattacgattatgattagcatgatgattatttttaagtgaagcttgtgcgaatctgtttccgtcacaagacgatctttccttctttcttttccttcttcctcttctccttcttctttttgtctttctttttcctttggttcatcttcaacacgatcagactatccaatcgttcaaacgtcaatcttctgcatctgcacccgcacctgcaccatccgtttggggggacaggtgaaactttaaaaggactggaccggagaacaagatgtcgaatgcaaggctactatctgacggttgattcaagtcagcgggggcgctgcttctcctgcatgccgatggttcttcgtgcatggaccattgttatttaacgatgcactctactaagaggacgatgcggtactagcggagcttcacaagcgcgctggtagcattagtttgcatgttttgtggatgaagtaggttgtctcatccacacattggctgcgactgggggtaatcttggttcttgctgtcggcccctcctcccgtcatccctaaggggaaaaaaaaaaagaaaaaaagaaaaaaaagagatggaaaaccaccgagtaatgctgtagtaatcataatctactatattctacatttaccaatcttggattcaggttagcctttccaagatcataatcagatgggcttgtcttccttgtttaccataattttctctcattctgacaagaacctactaggatttgatcagagcgtcaaattcatggatggcctactggacggactgggtcgtccttgcagtcctcgttccattgccatctcgccaaataatggaatttattcattgacccagcctccaggattattgcagtctgcgtctaatagcgggatctttgaccccactctgtggttatcaattactataatgtagtagtatgtacggagtagaagtactagtaactatcctccgctgctatcaactgtctgccagtcatcgggaggtgcattccagctatcttcgataaggccaatgcacgtcttaatcttcttctttctttttttttcctttttttttttattttttatttttttttttttttgtcctcctgtgcatccgtaaacatacggaccgctgtacgggatggatcgaccgcactatctgtatcctggacctatagcccgaacctgcctctctttaaagcttcagctctgacatctgagcaacctgtcggctttagtcagttgacccaacgttctggggcgccattatccacctatcattagccggctagcgctcgagacatgcgccttggtatttgtacttcccgcgcggaaggggtccattttctttttcttttgttttttttttctttttttcttttcttattcttttgaggttttcatgttggacttcagaagaacgcaggtggccgccatctatgctcatagcatggctaaacccactgtctttttgtattcgtttattaatctttccttaatctcgaggccgttttttagacttttgtgaaatccgtagttaaggacagtagcttcaaactactgttgttgcattggtttattccttctccgtctgagtgtccatcaacttgcagctttgtgcatgcttagtctctctccatcattgatcctcgctcgggtaatccaggacttgaaggtgcccctcctctgaaagcaccaggtgggtgtcttccttccctccccgtggcggaagataccaacgtttggaattatctgaaaccgtcatttttgaaacacgctctctgcttggtacttttcagcctatcccacctcgggtttgtttggttgagtttgctgccactagttcatccattcccttgtggttcctttctctctcgatttctaaaaaagaacccaagagaactcgaaggaggagagtccctgcagttcccttaggctgggcggacgcatacctgcggcattgatactgttctgtacaatcccgaattaaaagtccgtttggctcagaaacgttgttgagagaagatagagtgtcacttggctactgcattgattgactcctggtatctttttcttccctccttgatcctcaatcttgtcatttcactgcgtgcttggtggcagtatgcatcgttgaaacgggctcttctctctctctctctctctctctctctctctctctctcttcctttctgttcttttcgttttctttctttctttttctctcttacttctttttcttccttctggttattctcccttggttttattttttgtttttattttttatcttcttccccctttggattggggagaatccctctctatttccggtcacagcaacatttgcgcatctcaaccggagtctttaaccacctctatcccatggtggttttcaccttttttcattttctctttcttcttacctttttgccttctttcacattggctgtccttgcccttcccctgcagagaggtgactagagcatagaagttacatatcaataatcctactgcttctacagtcctagttctctgctttatgacccttttcccttcatttaccctgcaatacaaaagcctaagtccagatatctcatgaagttccttcctcctgtgaatgtcagacctttattcaatgtctactgtccgtttcatgtgcgcgagcatcaacgtttcttcctctccctccctagttgttatacgaacctgtactgacttccatttctgccactcgttgcgtcgctaacgtggtttctgattgcttcctgagcaaccacgtgtttatacgtttagtagacgcatcattccgtttgggaggctctttgctcattcacttatcatcctttcttagtttagtgtttgttttgctttctatgtgctgcagcgtagtcgcgtgacgcgtttgaccctctctatacattcgttatagcctgactcctctgggctcctttctttttctttctttctttccccctcccctctggatcgtttgtcggattatctgttgagggaagccggtcatattcgcttccatggtcacctggatatgtcgaatctatcagaacgaccatggaccgaggaggagaaggtaagaaaggatattatattcttgattctgtactgttttctattttgatctcaagattgacggtccataaattttacctaacttcacaatttgtttttgtcacaccgatgaaagccccgtgcattgttacctatataaacggtttgctgatagtgaatattctgagatttagtacactctgcttaccgaaatcttgaagaaggccggggtcccctctagtcacctagttaagatgattcgagatttcaatatcaccccaagctgggcggatataccccttcctccaggtacagactgctggcaccttgctcttgccctttgccactctgaagctcgatttactttatgagattcacgccctatctatgccgttttctgggccatctcgcacagaaggatacttccaagttcgaactcagctttgctgatcttgttctcttaggccgttctctcaattcatgtcaggtggcattttacagcatgtgtccacaacatgttcaattacctctcaacccaagctttgcacccttccctcctccgcgccatgaatcctcggctcctctaccttctgcgcttgacaacagccaaacccgaaagcaccttcttttcccctcggataaaccaatattagctccgcgtgcgatacaacctcggccaacgaccagtacagcgtcattcagcagtgagagtggcgcatcagccctgttatccccaggttcggagagcatgccaccccgaggtgaaccaccacgcaagcgcggtcgacccagcaaagccgaatcagagagacgaaaagcagctgctgaagctcgcggagaaacatatccacctccgaggcgaactggctccaacaaaatgaaagccccttctacaccaaccagtccctcaagcatcgaacctctggctgcctcgttcatttctcatgccagtggcagtcggcgccaaagtatactaccatctgacctgcattatgtacctccgcccggaagacccccgagactttcaggaccaaatgaaaatgagggcattagggatacaccccgtcgtgacatagggcctccgatgagagacttgccacgaccaacggaaaggagacagacactaccttccccacaaacactacattcaggcccgagggaaacagtcccgcgcatggagcctggggagcgatcactcgaggcacccccgccagatcggatatctttcggtgatagcagccggaggtctctccttcatagatgcccagacgagccacctatctcgggtctggaggtgcctctgcacacttcggtcgagaaacaagccgaatgaccttcgaccgcttggttacccgctcatacaagttcgctagtctgaaaagctattgagacatgatgaatgaattacactgtcagttatgacatagatagcattgatttgaacacagatctcatattacgacctgggatgagttactgaaaaatgaaggctacgagcagcatgcaccacagcacatggtttcttctttatttcattccttttgcttctaattatgtgggtgggttaatgaactcagcaatacattccttggatattccctccaatttatcattataattgagccggcaagcccgacttatcattacaggcctatccagtgaactgactttttcctgtatgcgtctctgctccatagaactagcataggacaagtcaacatcctgtcagtcacaaacgaagcctcaggataccttaatacagtttcattccgattagtacaagtgccgatgctaatctgatgctccgcaatgaactgagttgacatgaataccatgcttttgacgtattgaactgtgttcttttacttcattctttagcctttgtcctctcttttcagaacagtaatctccttggcttttctctctttctctttatttttctttttgacctgttctttgtcgcagggggggggtgggggggggggggatgaaatggtttgattcaactggatgccgaatatcaaggtggcactatttgatattgtcttcatgtcctctttcttcccttttcttcagcttcccagtctcctaactggcgactaatttcaaatgttgatgccctgttgggtaaatttatggttcaagatgttataggcctagtgtatgtacagatctaatctttgatagagattaaagccatttcacaaagcagcgcagcatcccttcacatctacggaaatataggtaaaaatcgtgcggatggtatttaagttgagcaacgtcatgatatgcacaagcgctgttgccctttcaaagtaaataattataagatatgttgcatggcatagccacacgttcttggacagctgaagatacttgtcattacatagctgccagtatgcaagtatcagaatcaagtatacttcacaaacaaaggtcgcgtggagatttctcctcccattctaacgtacccccaaggaaagaagccttgaggatagtttcaatctcgacaatacttccaaggatagtgtgacatgtgacgacacctgtagtgtgctccggaattgaagcctcggaatctgttgagcgcatcgatatgcgaaaacgctatggatgcagttagtgaggcagacagttgaatgaactgaagctattcttgatgctgagttctagccgccgtgtcttgcctttcttgttgcctttgcagctctagctgagcccttattgcactcgcggcggaactcagacttggacccgatggtttcacgagccttttgccaatttcggggactgtgccagggattttttcttctactaatttcattacttcgtcttttccttccacgcgtcgagtgaggtacaccttcggtgtagtaccctgacgaggaaggctgcgggttcggatacgctcaatctcctgccgatatgcggtctcatatatatcaaactctgctgcacccggtgattcgctcacaacagggcacgggtcgatgtcagaaggttctgcagatagcatactatccggttcatcgaagatgtagtccgtcccggagtcgccagtattcgtaggcggcgagccagtataagtagaaggtccaataaacaagaacggaaactcttcctctaaaggatctcgtgcatgtccacgtgttccctcgatgctgcgcttggtgaggaccgaacttgtccgcgacagtggaacttgaggggatgaggatcctggtgtggttatggtttgcgagtcatcgaaagatgctcctggtattttgctgctaggtatgtggcttgaatcaattccctcagacctgacgtttgcactctgattactgctatcgtacaacacaggatcttgttttccagatatactggagtctgtgctgtctaggagctgttgtaagcgtggttcttcagcatgcagatgataccctttgagaacgtcatcacgttgccaggcatttctattatatgtgtttaggctctggcttttgttggaatttgaaacagtcccagctgcgaaactttcttcgggttccatttcaaggggtggttggacaaagtgcgtctcatactcttgtccaaggatactctgcatgggtgggtctgccttggcagggtcaattagtctcttgaaattcttcacggctttcatctgtagcttctcgttagcctgccttaaagacgcaataaagtttgtacaaagcttaccacagctaggacatggccaatagtctttgtgatagctgaattcatttcctcttcagtaggaagtccaactatttcagcagtattttcgctctccggcaatagtgggtctgttccattccttgtaacccaggggtgttcctgagtttctttctataagcaatgctttgttgtgggagtagaatatacccgtctcacttactcgcaatgcactcatttggatccttctggttggatctttctctagaatccgtgacatcaggtccttgaagttttcatcagtttctccctcacatgccactggatcggtcttaatagcctcatatagctcgaagatgctctgcttctcgaagggcaatctgccgtatcgcaaacagtacaacgtaacacccatagaccatatgtcggccgctttcccggagacatccccgtgtttgacaacacatagctctggagggaggaaagcaggtgaaccagccgattttgccgtgaacatatcggagtctttctcgaacatctctgataccccgaagtccactaccttgagaacgtcatcgctcgttattaggcaattatctggttttatatcgcgatgtacaatgccctgagcgtgtagatattctattcccaggaccaggtcgcggaaccaacagcgacagagttcgtcatcatatgggtcggctctttcttcaagcccaactttcataactacccccttcttacacatctccataaccatgtatagagaatcctcggtcgggtcgtctaagacctcaatcagagacaccaggttgtgatgatggagtttcttcatgattgctatctcttctttgataaggtaaagagcatttctcttttgatctggatcttccagagaacgacggtgaagtggggaattgaagccatctgatgggcgcttgggacctcgaggtctccgtaacaggtgggattgggcgcgtttccttagccgtgccttggagaattccttgacggcctgactcagtgcacaggttgttagcttggagttttgtttttccttcgtgcctcgtgccacggtataagtccataaccgagctaccaagacagaaagaagaccttacgtattcattcccaaactgatccgtagcaagatgtaccgctccgaaagagcccctgccaatctcttgcttgatcacatattggttgattctgtgttcagcggtaccatcatcctggctggtggtatattcagatcgagcattcagggtttcctaccgccagttcagttagcttcctacagagagtaaacacattctctgaagaaccaccttgaccgggcgtctagctattgggtttcggcgataatgccttcgtggactctcatatgaaggtgtcgagctggaaccgcggtttttagcaacccactcaaatacaagaatggctgggagcccggaggagacgaaacatgagaaaggaagtgggagaagaagattaaggtgctgtagagcttacgcataacgaactggtcgcgggtgacgaagacccgggcgaccaccggaaaattgattagcgtcctgcatggaggggtacgcatattcgttggccattgaatacgctgagcaaaagtgggattcccgaaataccagagggagaacgtctaagttggggatgtctaattctccgttgagatagcagagacgcgaaacccgggtgcctaggcagatgtggggaagaaagtgggctgcacaagagaacaagaggcgacaacgctaggatgttctaataaatctataggagcattagtagactgtagaacatgcaagtcggagaagatacgcagatcaaaaaaaaataaaggaaggataaaaagaagaagctcaggagaagaagtataagcgagaatcagaggggaaagaagaagaatgctactacagtataatagtaatacctataaataaaatagggaaagaaaggtctttctcaacttgggatcctcaggcacaagtcaatctttatcgataaacgtcggatcttattttggatcgctcaccgcccacgagcatactgatccgtccacctaaacgagcctaatttaacggtctctggggatacttctttgaatagcaacctttctcacatttagatctccgcaccttaatgccctcttcatcaagtcagatcccgtgtattcttctgtagtgaattgtctgctatcccttaaccgcaatggttgtttattccttctacatctttgaccgccatggtacgtgcccctaccttgtacccaaccctcaacaaaggtatactaaccggcagctatcattttcttagcggaatgcatatacaaacgacgttgggtgccccgtccgccttcaattattgggaagtcctcgcgtccgacctcagaaacgtctgccactcccaatgcgatgccgcctgtgctgggtcaaccttcgcggaccaccgacgacgatgctaagctgatcttcggcaccgtcttctccctccggaatatggtgcgcaaattgggaggcgaggatgacaggtgagagcaaacctccgtacctctgccaaatgagtagaagagactggtactgacggtcgaaccctcgccttcagctttgtgacctatcgtaccagtcaatacaaactccattattatgagacgcctaccaacatcaaattcgtaatgcttaccgatgttaagagcccaagcatgcggattgcattgcagcagatctatattaatctttacgttgaatatggtatgcaagcccacgcattgaaactgacttcaccggccactaaagtgagggaattgtcttagtggtcaagaatccgttgtccccggttgagcatccaggcggtgtaggtgtaaataatgagcttttcgaggagtctttggaacaatttgtggtatatctgccatccctgctcagctcaactcaagggctgacacagcaacagacgcgcgtcctatcttgagaactcgtggactctaggatctccatcgatttgtctctgcctgacctcgcagtggacggagaagccaatcgtgcagtagacatgagattgatttgtcgggtatctacagataaagaaatcgatagattccgggattaaccaaggtgccttgcgtctaccaaggcagtgccacgaaagacgcatcaaagacatgcgtagcttaacccgggaattgctgtcaacccgaaagggtcgccctacggctagaactctccggaaatctcaaggcgcgggagttgccgagggaaagaatttgggcgttgggggggggggggggggggggggggggaaaagctgctttacgaacccatatggccatgttgctgatgcacctgtgtaatatgcattgacttactagatgcaagctatgggtcataggatgccagtcacctctcaggttctatggcggccgacctcacactatgtgattgacaacttcataacagcaaatgagagcagtcttttgtttgtcaaatacattatggaagaacatactgcccaccgttccacttgagatgaattacaaaatcaccaggtcctctttaaaaattagaactttagataattcgacccgtggcagaccttcctgactgtccgtaaacaacgtcctcgggtagatcgtcctccccaggcccttcactatatccatcctgagtacggggttttgcatgacgcaggcggtcaccacgtaagatgttacttctatcgatagcctcctgttcgtcttgcgctgcaagatggttagcgagcgtggcgacacaccggacgagtctaaagccttacctagttgcttatcactgttggaaaatggaggctgaataggatcttcaacatcatcttcatccctttgaacagggatctgatttcttagctcggaacgagtttcatgagcgtaggaattgtccctgactattccagagacaggggagggatcgttctgagactcgtagcggtcctcggcttctctttcgtatgggttcgacatgatttttcaaactaatagctattttagagacgatatagaatgtacttgtgatgggtacatatgaggaatgatatgtataacttgtgtagtcgcttggttggggatagtagcgaatatataagcgtttcagtcccccatcccaacgcacttctgacatcagatagccgtcatccttatgtatggggcgaattgggttctcgataaggttctaggtaaaggtcggttgaggtgatgcaattcgaagggttcgtctctacatattgcttggttcatgatcggtacaaacccactaagcttgatacaacctatcaaatagcttagatctgaatcgatcctttctgcagtatgccaagaactatctgacttaagttactgatacctttgatacctttgacctgagcttatcatgaggtagctcatgaataacagtaggcaaagcagcgggaaatggtcgttttgaggtaaagggaggtcccgctcattgcaaatgatttctttcgcaatgtagacctgctttcaggaagcaaatcttacccaaaagacacggaggcgtaatttgatcaatgtcaccggtagctctagccacgaatgtgacataggaatgattcagactgaggtcatcggtcccaagatgctgaagagattgctcattcaagcaaatcgatatctgagcaggaacgtcagggctttacccattagacgatgatgcccgccagtcaacattgctttcagtccaggacaggttaaaagagtctagtacctaggtagccttgggaatgctagggccagttctgatgttattcatccgcagtattatgtaatatttgggtaaatccacgacactcttcgcaacaccactagacaacgattcacaacccgccactcgtaggtaattagacatgatagacatggttttgctatagtcagagatagtggttatagctttaaggtgacagaaaggacgatttaatcacccatattacgggacggaaagacaactctctgtagcatacaccacaaaaaggaattatcgtgccaattcagtactatcctactcggaatatgtctatagaatctgaaactcacggtcataaacagtatagtatatcgacaacttattttatatgaccatgtcgcctggaacctgataaattctataaactgtactactaatgcagtgtacaatataaaccagtaaaagaaatggctcgtgtagtcccacatacaaagggttaggtttcagaaacagcttgatcttgttcgggaaggccaaagggatgcacgaagcttgaactttctcgcggcaattcattcgcctgaggagggggggaagccccataaacttcgtactgtaaagcagactaccagcccttaggctccgctttgttcaccgtactccgtcaagttgttacatctagaaattttttgaagatggagaaaaggagaaaaaaaaaaaaaaaaaaaaaaaaaaaaaaaagcaaataaaaacaaagttaaatcaaataataaatcagaaaagaaattttttttttttgtacagacacattgaggatttaccagatcacggaaagtctcctagtcttgaccctccacatgaaccaatcgcctagttgatagtagattactatcaccctaggtggactggaattgtggctttcgtatgggaagaattgtggagtggtttaatatggcaaattaagactttcgagtaggacccaatcatgatatatacctaagtacagagttgtattccccgcttctgactcccatcctcagaggaaccaagtacgccactcagtgtgttcaggagtgcatattttgtgtgcggtcatggaagcatgcggtgaaggatgagaggattctaaagacctatcggcttttaggctgagctggtcactttctgacttctacctcccatccccagtcgcttagttgtatgacctggcggtgaaccggaccccgtcgcatacaacttgaatgaacactacatatatacttcagtccctactccaggaatcaaggcaatagctggggtttgaccgactggtcaaactcaaatcatcgggtgacgaggtattgtgctgtggatcataaattatatcgagtaatatcggaagatgttaaaagacaatagtaacgggtacccgcacccatcggaaacgggtggttggatttccgagatttaatgcgtgttttctgatcacccttaaacaatccgagccatccagtcaatcccgatctaatacgtatcaatatgcagtaagatagccgcggtatcagagatcagtttatctcattggtaatttggcatatcggaaagttggtgaggagggggaggaggaaagaaaataccctcctctgaacatgagagagggaggtaaagtagtacttcgtgtcagttgcagacttgcagtactagggcaactacagagtagtgtggtacagtactccgtacagattctatcgggaatgacccactataatgcagcgtggtaagtaattttagacgggacggttttctttactcccgctgtttcttctggcccgtgattggtctcaaaaatccctcgtgcaatttttgataatgttggttgatttactcagtacgtcagttgtataggtaagggctactgggtaccatctactaccgccgtggaggggagattagaggtaaaaagacaaggaacactatctcgctccagcttcagttagccaaccatagataggtatttgcaaccaaaagtacaactgcctaggtcctaggtacgggtcggttctctacggagatctgtgaatctgtaaggtttgaatcatgctccaagacactccgggcacggcagccacagccgaggtccggagtcctagctttaataagcccacgtcgtccgctctggcatattggtacggatatacgaggcctggtgggtgtcgcattgtaagcagttacgcataccttcccacgttaagattgacaaaagaagtattgatcatcacgtagctagaggtgttttggcagatatgtttggtggtggtggatgactcctcagaaggacaaaaggacggcggaataaaatgaaatgataacaatagtagtcgtagtagataaatcaatgagagatgtcgatgatagccttagcactcggccgtcaattcaacttgacatctgctgaccccacgtggatccctcaagcaagaagccaaaaagagccatgtgcatgataaatagtcgcttccagtttataattcggtagaggaactcatgatctgatcatagaccataatttgaagttaagacatagcctcagcagctccaaatatactagttagcctcctcaagtgaggtaatcgccacgaggaaatctgacgattctcccatcattgactagtaatagctatcaaggatgttgtcatagcatgtccaatccatcagtgtcttagcccagagaagtctgatatgcaagcttcaaccccgtcattgtcaaaaatctgcaaaagtgatgaagtcgtcaatgtatacgttgattgatcctacaagccgtacttgaccgaggaaataagtattccagtccagagaaaaaggtagttcaaggaagagagaacagagaatcaactcgtgcattggcattggccgtagtaatgtaactggtcaatgaaaccccgaaaaaaggtcgatccctcacaccctatattagacattctgtgtcctcgagtgacgttggcagccaactttctcttagtagcccacctttaggtcctctctttaattacccctcactgcgtgcatgaggaggggttctttttgatcaagccatttaggcaaaccgccacacaaaggaactaagtaaggaaggccagagtgataatgtgacgctttcccgatagttctacctgaactggtccagccacccaagccatcggctcccgttgtgaatgatgtgcggggacagccatacccatatgatccataggactgcagattgcacagcctcagtctgacttgaactcccgagattgactaatatcctatgcgggtcgcgtttgtttgataattgccagtgtcaccaccctgttcagatgagccagacaaagcggaagtgagtgtaaagctatcactgggtggacgtcatccgactgatcttcatcgaacaagaggcaagattgtaaagaaatgaagaatcgaaacatgaaacaacaatcagatttccttgtaattactgattactcaagagaagtgagcagctccagcgtctttctaacggtccttcgccagaaaacaaaatagaaataaaaaaatatttacaaaataaataaatacataaatcaatagcgaaagaaaaatgcatgaggcttctcacctcatgcaataactaacctgtggagctttttctttacacagggtaaagatgtggaaaggccgccactttggttttcttacatcttgtccaacgcactacttctagtccctggtacaattagcctgcaatactaggtacatacatatacatacatagctagtaagtagcagcactgagcgatttgtcttatccactcttcacctccattgtcccgttgtccgatagtcggggcttgactttcatggatacgttgttacttgagaggatacccagtaatctctggaaataaaaaaagaaacgaaaacctgagtaaggcaacaacgattctgtaaagtcccaacgcagtgactccaatggtgtactatcttcacatcatcgtactaggtactcatatacatagatactctgtatgatacatacgtactgtacagccattttccacactggcgccctggtttatgttaacagctgtggctgcaactgtattataccataccatcacaggacgataccgataatgtataccatcggcgaggcctgcgaacggagggtaagtaaatttccaaccaaatcatccatctgattactcgattctgacaaaaaaagagggcttcggctccattatttgcttcttacttccacaaccggcaacaagaaagtctcttccaatcccctttgtaacctcagcacaaggcgtacccataggcactggttcccaccatattatcaaataatagaattcgaggcaagaaaaagactggtcgctctcccacaggaagctcaaggaacgcccacccatactttcaatattagtttacattactttgatactatctagaagccggaatactatttcaacctggaccttcccccagcaggcagctgcattctcacgagagactctcgctgggtactatacctttactactacagagtattttattttcttggaatactgcctttccctctcggagctacctctcctgccccaactggaattttcaagctacataagagtctagtctcattctgtggttcacagcgtggtaccgtcccatctggacattccgtgccttgctgcgctaatttttccttttcctcttttttttttctcccttttcttcttttttttttctcccttttcttcttttttttttttccttttcttcctcgccctccacttttcactttcgtcacttttcagggagaccgtcgcctcaggccaccaccggtcaccgggggccacacctctttttttttctcgccctcttcctctcccctcctcttcctctctcaatctccttccaacctttaaaccttttaaataacaatcttctggggcctctccagcttcgtgctgtaggcgtttattctcctaccttgtcacgggggcaacctttgtcactctcgtcctccgtgtacattacaattagttaccgcacatgactccacaatctgcttcacctgtaccttccgcagtctcctccgccgcagcgtcacagatatcgtacgatcctcgagatggagagccctcggtaacacgcgctcttgcgggcatgaatttgtccgcagcgaacggggatattctccccacgccccctccgcctgcgaaaactgccaggccgactatggcgaatcgcatctctcgtatgttttccaacacagggaagacaacttcgaaggagccggatgcccatcgtgacttttcagacagcagcacagacagcgtgaagccatctagcaatggcagcgggaggcaatctaagcccacttctagaccctcttctagagctccatcgcgacagacttctaccaaggaagacaatgagagaaagccaaagtctagcagtggaaaggaccaaaaagactcatctgcagcagcacacaagcggttcgaagcattgccagaccacgcccactgccatcaccttaagagtacacggcgacaggagaaattgacagaccttctccgggatatgcttggtggcggcaggaagaaagacgatcatgtcgatgatcagcaactatccctcatgtcaacatggattgaccagttcaagaatgaacgtgataaattagcggccgataaaaagggtggtcccaacgccacggcttcattagtcgataaatatggtaaatgccaggagatcgtcgggcggggcgcattcggcatcgttcgaatctcacacaaagtcgatcccaaagattccagggttgaacaactatacgctgtcaaggaatttcgccgtcgtcctcaagaaacgaccaagaaatatcaaaaacgtctgacctccgagttctgtatatcctcgtcccttcgccatccgaatgtcatccatacccttgacctcttgcaggatgctaagggtgattattgcgaagtaatggaatattgtgctggtggtgatctctacacccttgtgctggccgcaggaaaactggaagttgccgaggccgattgcttcttcaagcagctcatgcgtggtgtagagtacatgcacgaaatgggcgtagctcatcgtgatcttaagccggagaatctgttgttgaccactcatggtgcgctcaaaattacggatttcgggaacggggagtgtttccgcatggcctgggaaaaggaagcacacatgacagcaggactttgcggctccgctccttatatagctcccgaagaatatatcgaaagggaatttgatccgagggcagtcgatctgtgggctactggtgtaatttatatggcaatgaggacagggcgtcatttatggagagtagcccgcaaagacgaggatgaattctatcagcgatacttggagggtcggaagcatgaagatggttacgctcccattgagactctgcatcgggtaagcgctgataacagtctatttggtgcgtctaaacttacagatagttcgcaggctcgttgtcggaacgtgatttattccatccttgatccaaacccttctcgtcgtatcaacgcctcgcaggtcctcaaatccgaatgggttcgcgagatcaaattgtgcaaggctggcgaggagggattctgatctaatcggcgtgtcttgccctcgaggttttgattttcgcagatagtgtatccctagggggcagagcctgggcggatattgatcattagtccggactctgtctctctctcgtggtagcctgcctctgtatgcctagttttgtgataaaaccgggtggctcatttgtttatcccgttctattgggggtttagaccttcttcacctgttgcttaaaaaggaggtccttttgctttctataccggcgcatgtcttacctttgtcttacctgcctgctagctgaagggcttagtttgtttttatgttttcacgctaatgcaacgaagagtcatgaccttgagctccttctcttttcttttcttttcttttcttttcttttcttttcttttcttttttttttttttccattctcttcttcgtctttgtctttgcatttactagtcacatatattgcatctccatcattctatctatctggcatgcagagttaacggcattctttcctcttttttatttctgggctcttggctggctgatacattgatgttactgacctactagctcattcgattaggtcacaatggagggcacgttcggttttccggctgggttacgctgatgctgagattcattcatcagattgtttatcaatgcgcatttcatacttgtcagttatagcgatctgcatatccgtgggactgtcattcattatgtactcggggtttgggcgcttattatttggataccctttgacactgttcgtttcaatgctattgttatcagaaatcttacaacctgatgtatctttgctggtcatgaacaaggccagcttctctccttccccctttcgcctcttccctcctcccctccttccctctggttacatatggtataatggatactgttatgaaaccaggagagttcaagggagtgataggagctttcaatggagcagacttgtttgcttgtggaactaattcttgtgccgtccctgccatcgtgtgatgttgtatcttcttcccttaggactgcaaagacaggggcatagcgacatctagtctagtacttgccacacaaattcagttgcttttccgtggctaggatcgaaaagtctggaacatttttcgatctaactctcggctatgctctttgagtaaatcaccacttaccccgtagttcttcctcgcgtacggcaacctcccctttccttccttttatttttcttcttgggtgaggagagaatccgcttccattgatagacagtcacgatgtactactgtacatgtacatgttcttggcagtgaaataatgtcttccctgagctagcttcatctgcatgtcagacaattacatatcactttgggtacatttttaattttatttttattttcttctctctctctctctctgtggtgagtggctatgtacgatatatcttgatgttattctgtcccgtacattgatttaattaccccgctccttggtcgagttagaagccggtagattcaaacgtcctaaacatacaacttctatagccagctgcacagtttgcatttatggttatacccccctgcctatacccctacagaattacagcaccacgaagtcactgattttcaatgtggggtacccaacttgaatacattcctaagagcaaaaaccctcacatctccctttcacaaaccgcggttgtagtttctgcctagtaccctgacctagtttgtgcaaggttatcagcgtctagccatttgaaattgacgatggtcctaggccaaggttgcttggcgcttcgtgcagacctcaaaagtgcggcaagttactcaataagaaagtaccacacatgattttctagttgtgtgaaattcgaattggtctttcttggcgcctagtcctttttgcttttcccttgcattggaattccttggcatcatgccctaatacatgtatgtatatcgagatgggttatgctcgtgtggtggtagcaggcagcatgattctcagggattccaggatccacatatgaagggcgtggtcaggaatggttgcatgtgggaaccaaataccagtagtactatttcacggagtcagcgatgcgaggctagactcatgttacttgtttggttcggaagagcatctcagcttgcagatccatctgaccaaggcttggccactcatttagggcttggtcaaagtcacagttacatggtggcataggaagtgagtgctcttcggacgcggtagtcgtataagctgagcgtagtgtaggattctcaactagatttatattctgtcatcctcatcccttgcggttctatctggttgctatatgttggactctttcttaaaatcgaactaatcgatatccatcttcttatccatgagtgcacaaagttgaaggggaatgttatacttatactcaatgtatcacaagtaaatcctagatccaaagcgcaaatcgttctactgagtgtcgtattgagcaacagtccattttaagaaaaagagaaatttctctgacgttgtgcaagatcgtgatcattaagtagtaacttggagggcttatagtacactgccttcaaagttgccactggttgaagtactgtgttagatcaagcactaagcagatgtcagtcctgatatcgaacctaaagcgagtgctccatcgacttggactagaagaggagatcgaattgacatcaccatcattattatgtattgggagccaagttcaatacatgacgtaagacgagacagcggatagggattcatgaccgtattgtatattaccatgtgtaattatctatacaatactgttcttccatagggctggagaaaacgtctccctgtatgaatgtacagtacgtgcatacgtagtagatacaacatacacagccacacatagccacattcgagagaatctcccccaaagtcccgcattgggacctgatccagccctgtgacggtcacccattgtcttttcgaacattcaactatcgtcaactgatattctgccagacaatccaggcattctcttgtcgcctacattacctgcacatatcctatcaaatatcctcaaccgccatcacttgtttcattgcctacagtagtactccgtcggttctgcctgcttagccgtcatcatgtcctgggcaggtgcgcaaagctccttggccccttatctctacatatgccagattaagggctgatatgcagttgtgagtcttagggttcaagaaaaatgtcaaccgtgctaccacccaagtcatgatgaagacgggtatgtacatcattatatagccccgcggctcgagacgaccaagtgactgttgctgtgagcggtagtcagtcgctgatacattataacctgtacaggtcatgtggagaggacaaacgatcgtgactatgaaatcgaagaacggtaatggcatcgagggatttggcataagctaagccagtcactgatgggatccataggcgataccggaccatggaggccgctgccaaccgtctacaaaaagaggctaaaggctatctcgattcattacgaggtgggtcttttttactcgttcaactgggagcgaaatgctaagcccttggttgtggcagcaatgactgcctctcagatgcgtattgcggagacaattgatgctttctacggtgatgctggaacgcgcgatggtgtgagcagaagctataaacaagcagtggaagatcttgatgccgagacgataaaagccttggatgggccatacaggtgtgtgacattctggaattggagattccatggctatcgctaactggcttattagaactaccgttctcgaaccgatttcgcgcttttgcgcttactttcccgacatcaatgagtgcatcaagaaacgcaatcacaagttactcgactacgactctatgcgagccaaggtgaagaagttagtcgagaagccagacaaggacgccaccaaacttcccagagcggagcgcgaaaccgaaattgctaagcaagcatacgaacagttgaatgaacaacttttcaccgaactcccgcaactcattgacctgcgtgtaccatatctggatcctagctttgaggctttggtcaagattcaactgcgtttctgcgcagaggcatactctcgcatggcacaagtgcaacaataccttgacgcggaaacgagagatcagtatgctcggggcgatttggataacagggtagaagaagtattgcaggagattcgtgatctgagtatagcgggaacggtttgatcttaggaattatctgtatcattgctggcctgtttgttatttgctctgcagaattgttgctgtcgaggtttatctactatcttgcttgtgcaagggtctctaggcccggggagtcattacatataataaaaactctacttgtctagtaggataagagagggagagtgagtatagtagctaaaagcaggtacgcccaagtcctgatggtaatggctccgaagtatggaatggtgtggcatatagacaagcaaacaaacctcttcactggattttcagacttcgctggtgcaatttgtgtcttaacgtgctggtcttgggtatctgtctatatgattctatttatctgtacaatattttagcttcagcgatagctgtatagctcgccacagttattcacgaatatcacagcgcgctgccatcacgatatatttcatctgctagaatgtccaacacaggtccagctgcggcacgtactgctgccaactcaatggcattcatttccgtgagaacatagtctgcaacatcgccccgattccgggtggatggacgaccaatcccgacacctattcgcaatacagaaagaccttcatgcgagcgggtttcgccaggccttgtacgcggtgggtgcaagcctttcccccgtagactctccataatgctggtcaacccccgatggccgcgcaaactggccgtttcaggtccgccccgtttcactctaactttccccaagggcgcctccagctcatcgtggaggatgaccagggtgggagctaaaattttcagcgactgagggtcggtgccacgatgctgccattcgtggttctcaggatctgcgacctcagttgtctcagagagcgccacatttccctgcatgatcaccttttccaatacctcggtctgtgtcgtagatatccagttttttagttgtcggacaagcttcggacccgactcgttcatatacgatgggctataccatgttcgatagaacagcggcccggtagatggctggtgcttggtggatatcaagggaaacctgttgggtaaaagaggtatcaaggcatcaaggaggatatgtccggcgctgtgacgagtctggcggtaaggacggggatttccgattgatgcgatgaagagaaatcggtgcggggtttttactagagatatgtgggttgccatcgaagatggtttgtcttgttggaactgtaataagatatggatagatatggctcctgcttctcttcattaaaatgtgttgggtgttgcctctctagggtccgatgtgagaaccaggtatgaaagggataatgaacctgttaagaggacggaatcagtacaccatcagagaacgtaggtgtacaattgaaaaggaaaagtgtccatgggatgtcgtttttttgtttgataggtaaaaattgcacaaaaaattgttctcgttgcgggagatcgtccctaggtggttaattacaattttattttcaaaaagttggtttctatcgtcaccaatccatgtattgaaagaggatacagtacagttttagaggtattgtacgtattcattgtcactggtttctgtaacacccggtttgatgtaccacatacggaaactggatttggtctccaagagacccaactctgagccaacattttctggttgaaatgatatctgctataaccatctatctgtctagacattctcaccactgtaggcctagtgcggcgcgtctgaatgttatagtatctattaatttgggtatgactcatctgtacttgaaagccagatcgtctatcaacccatctataactcgatgaagggaaacaaggcaatcgttgattggactgcgaacaatatcacgcatatctttctacgtgatcaggtctttgctgcctacctctacacacaaatatagtacggatcagcattggcaacctgtcagaaccaatctccggtctgaggttgcaaccgccgacctagtcctgtcagtaactagattcttctatccttttcgtttattcacttaccttgtcgtggtaggatatgctgcctgtcttgcagggtttaaacctccgtctatattttccagtcaggttacgctcaaatagcgtatcgaatcttatggggcctggtagattttcgcctcgtgagccagacagcgtattgttcatctcgcacgtgtcagtgaaactgttcaatagaatcgacacccaactgccacagctgttacgcgcaacaccggtcattcgcttctaatctgatctcctttaaaccggccataactttgaaccttgtgccttgatactgccagggcattggcatgtcttttggctgctagtgatgcttgcctgatcctgtatcgactacaaacgcccacgcatcaccatctacttccctgcgccctgtgtccaaaatcgagctctgtcatgtcatcaaatggaatagctaccccgctcgagcatagcgttaccacaagtcaagaagggcgagaatgaacggccaagtgtgcctccgtcggtgtgggatatatctaaagagcaaatggagactgatgggctctgacggaaatatttcaatatgggcactctctaagcctagctcgattagagctgaccacggcaggagatatacaacgtccctcgacgcacggaattcgtaacggagaacaacaggcaatactgtaataaaacctactctatgcaataacgtagccgagcaaacccatttgaacatcgtccatcagatgtgtctctttacgtttgtcggtaatccaacctccgtcatcttggccaaggaaacaccacagattcgtcatttcaagatcggaccgttgactgggcgattcaactcggagttatacctacatcccaatgccatacgcattgcttccgacattgggatgttcgaccatggtctcgggaatcttgatctcccgaacgtcccctttcagctgggtgaaacatttgacctcatccatatacgtggccttgtcggcattcgcagggcattcgacaactgggaattcatctatgaacaagcattcgaacaactttcactgaggggtccattcacagacacagatcctgagggcggcactgtgacataccctaattctgacgcgtatgtcgggattttctcgtccgttttacactctatcgccgaagaggctggatacctgcacgatctgagccacctgcaacccggtgtgcttcgtgcggcagggtttgtggatattcacatcctgtaacgcacaacactaatcgacctattggcccaaagatcctcgtcaaaagacgttaggcgaaatggtcctgatcgctgccttggaaaagccggaatattataccctgtggagctcttgatgattagaagtctctgatttaagggacccgtctattggaatagtcgcagcacatatttttgtgtcctttctttctaatttgttaacataggtggctagttggccgcagatgaaccgtgcaatcgtagacgaaatgtcacatcaaaatcattacctggagactcaaatggcaatttctcttttcttctcctttccccctccttttgtcggttctgtagagcttccaggctacatacccagccttgacagtacctgctgtgtacttgaataaaaaaagcaaaaataaataaaggccaaaagtaacgttttaggttgaatgatcatcgaaaagaacaccctgaagaattgcttcgccttcgtcttgacgccagtggcctgcatctgtcaactgttgtttccacataatctgatctctctcggtgaggtcctcccagcggcggaggaccccgtcaggtgcgttatgatatgccctgttcgtagactcaatgaggatctcgtccgtatcacggttgcgacggacaacaatggaggtatgtgatagaggggcagcggaagtggatgggtcgtccgctgcaagatcggtatcgaggattgattcgatcgcatctgctgcttcacgggcatgaaggagatcacgtagggagcggtgatgtagggtgggaactggcgacgagagtgttgagtgcattgacatagtgactgatggaactgctaatggatgtggcacaggttgatgatatggacgggcgacggcggcacgaatatcgggtgggagccattcggtagcccccagatacggaggcataacacccctaatctcagtgaaagcctggaggaggaagcagacaatgaagatagataacaaagcagtcagcccactggtgaagttagcccaagcatccgaatctcccggcatgactagcacgtagcgcggtgagcgactggagggcggcgatggagccagagggagcgtgtgtacgacgacggtattgcccatactgacagaggcaagcttgacatattgtggtggcgtctcaggcctaacgggcttcggtggaggaatgaaagaagagaagcatatctttgtcatggagaatggatggacgtcgtggagggtagtgtaggctcgtagctttccgtaacctcctcttctaggatcgtactcgagcgtcaggacctcgatagattgatcactccccgaaacggcaatgatggtttgttcctggttctcgaggtttgaacccagattgcacacgtccaggccaagtccaattttgattgttttgcggagcttcttacgccggatgatggttgcagatgactttgatcccggtgatagtctttgcggtaaattgagaagcacgagctcgcagcctttacggtctggtacattccgaagcagcagcaacattgtgggggataggaagcgcagggctcgaaatttgggtctgggtccagttgctgcttcagacaaaggcgtgctatatatgcaatgtacatcaggtgatgcattagacctcgttgaggctgagacctgacaggtgaacacgtcagtgccattggtataggcaacctggaatttgtcatcgtccaaatctgtaatatctacatcctcagcttcctcatcactacccaatagaatccttcccaggatatccgatgtactgggtgcaggagtaacatgaaaaaggacgatctctcctgaaggagccagcccagtcgcaaccgccgctatacgcggagactcggcgtccttccacggcgagagtcgcaataccctttggtatgtgtccggaccgccggccttctctgttcctttggtacggaataaggatgtacgagataatgcggtggtcttctggggaacttggttgttggtttctctatgcgcttcccgagttgcgatttcttcggtcgagttatcggtaaaggatctttttcgtggggggtagtcaatcttgaaagatcttagatgttggttattgccacgcttttgctcagctacggagctgttaataccagcgaaggcgataatatagtcatcgcttgcacgcgctgttgccaatgaggtgaccgagtcttcatcgcgtgagagttcgatatcgactacctcggagatctcgttgcgtttggatgtgtccaagagtgcctgttattgtgcctcgagtattagagcactgacaagtatcaaaagacctgggatttaagatatggtgacagagcaatctcgaattattgtgtcagaagggatagggtggcacttgcaattttgttcccaacgccactacgcccttcgccgcctccgcctgcgacaataagaaagccatgattgcgcggatcgaaatcggcagcgaagagaggacaggatagggccaacttggccgaagggacaaggggcgccattatcaggacggactattcgtcctagacaagggaagagttgaatgtgtattcagtaacaggggaaggagtcggaagttacaggccaagtaagcttccgatgacatcggcgtttgttcacgttccgccccggagttaattaaattcaacccatacgtcttggcagataaggactcctccaaggttaaaccttacaatatttagataagaatcactttttattctggaatggaatcgagaagtaaaggatgaaatcctaagtagaaatcataatcatactttctgccggatatctgcaaaggtctcgaacactcttcacctcttttctaatgcggttgtaatgtaatctaatcaacttcttgtccagtgaactcaggcagtcgcttgcgaatgtcttcccatgtctcatcgccttccaccaaggacttgagagcctgcaaaatctcatcctcgctagcacggacttgcttagttgagtcacgatcacgcagggtgaaagtgttgtctttcaccgactggaaatcaacagtgataccaaacggcgtgccaagttcgtcattgcgtgcgtaccgctttccaatgctagccgaggaatcgtcaacccggttggagatgcccatgcgccgcatcttcatcatcagacgatgtgacagaggacggaaagaggcatggttcgagagagggacaatgagaaccttggtaggagcaattgctggagggaaggacaagacctataacacagatgttagtgggggccaatttaacgtgctactgtgaaggacaagtacttacaccacgcgcttcgtctccctctcgggaccagtacacgtgttcgagggtactgtacaggatgcggccaatgccaaacgatggctcaatgacgttgggcgtgtattcacggacattctctacccttgtccgcttctcgatcttgatcaattccttatcgagctcaactttgcctgagctgacgccctccacatccacctcgatcttgccttgctgctccagatcgagagccaacttctcccggagttcctgggagagagcctcgacagcggctgcaacagtcttgccgtccttcttgaagcgagggccgaacttcttcttgtctaagtcgacctgccattcttcaattttgaggggttcggcgcgaggctcacggacaacaagaggagctccggtcttgttcttgtgcacagttaagtcataagcactgcggtcggcgcaaccaacacattcaatccatccatagctggtctgcagctcagcatcccagcagtcagcagcgtagtgagccatttcattagccatgtgttgacggaatcggagcttcgctgggtccacacccaacttgaggaggaagagctgaatgcgggcaaggaagtaaccaagagtttcgttgtcaaccagaccggattcaatagctttgccgatggtcatcttcgtggtttgtgtgcttccagacagctgcacatcacggctaagcaaggaaagttctatatctttcatttcttcaaagcgagaatgctttttgccgccctccgggtctacgtagtgttcaatctcggccatgaggaactcgcgcactcgcagcaggccggcacggggcgagatctcgttccggaacgacttgccaatggaggccgacgcgaagggcattgactgctggttgaagtccaacagcttctggaaattcaggaactgtccctgagcggtttcaggacggaggtagccaggcatattgctgctaggaccgattgaagtctggaacattaggttgaacgcaacgggaggaagaagattgccatcggtcgtcggatttctgatatcgtacttggtgatgatttgttccagctccgggccgtcgtagttgtcaatttgcgctaaagtttcctcatactccttgacaacagcatcgtctaatcggacagccttggtctccttagcctttttcttcttcttggcctccttctcttcgtccacgacaaccttctggccacgcgcttccttgtcgcctttcaagcgagcctcaagaacttcttctactaggtgatccgcacgaaagatctcgccggttttggggtccttgcacatccagtcggcaaatttctcgacgtgtccgctagttttaagaatctcgtgcggggtcagcatagtgcagtcaacctccagcatgtcctcctcgagcacgaaatgcttccgccacaaatcgacaatattatttataagagcacaaccaggtgggccgtagtcatatagaccagatacccctccatagatctcgaaggagggggtgtaaaaaagacggcggcggagcatcgactccaagaccgtgcggtcgacgacctgaccggtcttggtattaacggtcgccatggcggtgttcttttttttagaaacctgggcggctcgaaaggtgacgggggagagggaaaagaatcgcgtgcctatggcggggttccaacgaggaaattggaattggcggcggggaagaggaaagagtcgagtgaacgaagaagccaattgagtcatccacgtgagccgcaccggtcgcagtggaacaccacacggttgaatggaagcagaattaaagtataagatgatataagaagggagaaaaacaacaaaagcgactggaatttcgtcgcgagagaagcaatagtaataaacaagctaaaggattggactgagattatatcctttcccctttcaaatcagtcatcaaaaaagccttaattaatctccctaatctccttcgagtcgatcttctaccgccggcgaaacatttctccgccaaattttatctcaaaactacatccatggcttctcatgtccatttctaaagagcgcctctgggattcccggtttatccctgttccaatatggtttccagaaagtcgcaggcgaagcctcctccaagcgctaatctagatgtgaaacccgccaataaactcaggcgtcaactcctccatatcaagcggaagcggctcaaagactccacccgacgagcagaacggtataggattaaaaaggaagaagcaaagaacccaaagctcaagcaggagcgcttaaagcggaatgttccgctcactatcgatcgcaagcgggtctgggatgatgccaatagcgatgtcgaagacggtctgggattgagtgtcgatgttgagcgcatcaagaaacaaaagcaagaagagcaggagggatggaacaagccattagagcatcctgatgaccaagatgattctgatgaccaagatgaggtcgacagcatgctagccagtagcgacgatgacgatgacgacgacgatgatgaaggagacaacgacaacaataacgccgagaggtctcggaggtccaggagatcatctctcccgtctgcaacagagcgtgcaacaagcccgactcagtcgaccaagagcacaaaccttagcctggctccggaggccctggcaaccaagttcccatcgttgttcccgtctgaaacaccaccgacacccaagattctcatcacaacttccctggtaagttcatatattcgctgttacaacccaggtgcaacactctccattaagcatgcgtgagtgttgtaatagtgtatattgagcatccacgttaatttattagcagaactcaacccttcataacgaagccaaagctctcacagacctttttcctaatagccagtatatccgtcgtacagcgcaccgttattcccacaaattttcattgaaagaaatagcaacattcgcagcaaatcgcaattacactgctgttttagtccttcaggaagattccaaacgaccgtccggcctcgatgtgatccacctacccaagggtcccatgttccattttactattagcaactgggtagatggcaaaaggatccctgggcatggcgtgggcactgagcattggcctgaattgattttgaataactttcgcacgcctcttggaatcgtaacgggtgctattttccgctcattattcccaccgcagcctgacattgaggggcgccaggttgtgacgttacacaaccagcgtgactatatcttcgtccgcaggtaagttgctcttgttactctggtttaggcttagaggatgttgggatttgactgtcgctgcaggcatcggtacatcttccgggagaaacgagagacagaaaaaagcgtaattgacgcagacggcaaggagatgaaaggggccgaaggaataagggcaggccttcaggaattagggtgggtgattctgttattattatttccctcttgatagatactaataaatcgtcgaacagtcctcggtttaccctgaagttacgaagaatcgacaagggtattcaaagggcgagtggccaggaatgggaatggaaggctggaatggagaagcagaggacaaagttccagctatgatagctttaatgccaattacatcctatgttgatcggagttagggatagataaaaaaaaaggagacaacgaatgggctttatcgggtatatttgtgtgtagatattaattatactttggatgccaggttttcatatgtccgccaaatgttgtcccgtatgctatccaatacattcattaataataaactctcaatggtgaccaagacacccagccaattgccaattactcaacgatatagcgggctcattgctctatctctatgaaccaaatttaaccattctgacatctgatgaacatacagagtggaggtttagataattgtagtcctccccgggcactcaacctggaaggaccatgattatcatcggacgttgcttgttctatctcgccggaaggcgtgcataagcgaaagtagctaggtcagaacaacacaacagatgtagaatagattaatcacggcagtagaagctgtggcaaacaaagattgaaacaccaaacataacgccgtattatccatgccaagtccgaaagacatagccttataatttggatatcacacaagaaaaagatgattgtaatgcaagtcataagcgaacagatatcatccgggggcacgtaaatgggacccatatgtgcgtgagacaagatctaatgtaaatcgtaaaaggtataacatggaaggggagtaaagcccgtctcagttttgcgttatcaccacaggatgcaatatccagcacatcactgtccgttgttcttcttccaacggagcaactccgcaagactagggagactacagccagacttgaggaattcgtgagctagcagttcttccgcagtggcgcgactgcggacgtcgacacacagacactggctgaggaaggatttgagttccttgctcaacttttcgggcttctttagacggggggtgccattggtggcaataagatagagagctttaagcggttcctcgttcaggtaggggggctctgactcaatcatctcgatagccataattcctagtgaccagcagtcgaccttaggtccatattccttctgtttgacaacttctggggccatccagtatggtgtcccaaccatcgttgcacgcttgctctttgactcagtaagtttagcacagaatccaaagtcggctacaatcctttgttagcgtgatattgggttgttcgatagatgtgggttacttactaatctttacatgaccagcgcggtcaagaaggacattatcactcttgatatcacggtggataatattttggctatgtaggtgtgccagtcctttgcaagtctagggaggtcattagtataatccatgtgtattttaatatctcatcgcgctgagcagcaccgacgtacctctgagcaaatagtagcaatctgatcttcctggattacagggttgttgtcaatgacatctgtgagagcaccaccctccatgaattccataacaacccaaagctcattgctttgctcttgaaggaatgagtcaagaaagttaacaatattggcatgctggctgtctttcatcacaatgatctcgttgacaataagctcctttcgtggctgactacgcagatccatttgtttgattgcaacctgagttcgaggtccatattggcggtacagttcgcgggcaaccggagaaacagcatgttctttaacacgggcgacatacacagatccagatgcaccttgtccaatcttgcgttgcttactgtaagattcgttgggattgtctttagagacgacggatctaagtcgatccatgacttcgttctccgacattgctgacatgcgaacttccctctgccggggctcggctttcttagtcagggcagcttccgcttgacggacaccatcgggaacgttcttattagttgcttgtttgtttgcaatattcagtggcttcactggctgcacgggagcaggaagtttgctgggtggtgggccctgagcctgctgtttggtaccattgttctgagagcgcgccgcagaggactgtgctcgtggatcatgtgcagggtaacgcgagttgggagaagattggtctgaccctggagtgcgtgcaattccggggccattggctgagccgtactcccctggccgttggccctgattggagctcggaggggctggcgctgggcgctgagccgtgagctggcgtgcagagtcttgtcgagccgagctaggagcctgcggggcgggacggcttggtttgtagcgctcgttcattgacgaatcagcgccatagccgccaagctcctgtttagccagagggacgcgagtttttggaagtgaggcgttgtacgcttcttgatcgagcctgttctgctcttcttcgcgttgacgagtacggcgagccccttcctccatgcgtcgacgctcctggtccgccatctccttcattctctccagctgttgctgctgttccaaagcacgatctgggtctgatttgctgtgcaccggcgagggtgatgaaccagcggagcgattggagtgaccgctgtctaggcgttgggatggggctggtggtggcggtcttggaggagcaatagaactgccaaccgtattgctgttgtaaggttttggttgctggcttgactggggagaagctaatccggcataatactgtgggttttgttcgcgcatctttatatcggagtaaaactcgagaacttcgataacggcttgggggttcttcttatagtcttctttggtaatagccgacgcagtcagcagcttctcccactcaggcggtaatcccacaaaggcgcctgttcgagggtcgaaaccgacgtgaacgcggtgactaaaattggtgggattgcttacacctcccattcccgggcagcgctcgtatatcttgtcaatccagtcatagatctcgtcatcactcttgacctcacaggtaatgctcttggttggcacgtcgcgtgtgatcagggcagccttagaggtggcatctttcggattggccagacgaataacttcgaaggccatccgagtgtcttccgaacgggagacagcggtgaccgtttgaagcgggatcgacaagactaccctacccgtctcattcttcaagaagtctaatcgaaactctcgaagtatcaaatatcgctggttccaggtagccagaaatttgtcttccttgcaacgaacatacccttccttgatgacggctacccctccctgtcccgactggttggtctttgtttgtgtgagagacggggtgctagtattcgggaataatgacaagttggcagaccctggcgtaccaggggagtctaggctcatttggctgaaggaggcgaccgtattcgaggagttggcaggcaggttaagcttcggacgctcggctggtgggcgcggtgccggcccaggattcatgaattggtcgggagagtacatactgtgttgccgtcagttacctttcaaaggtcccagtacccctttggatgtaagaatagggacaaagccatcagtatacaccgtaacagatacacaaatgactgctaggcagtagtgataaagaaaagcaacaccggcttactttccataagttgagatgagaagcgcgcgggctccagaggtaggtaacttcttgcgggcacaggggtatccgtttatggttcggttatttagttaattactgtatattgtcagaaatgaatggagtccaacttcttaaaacaaggctggcgcttcaagtcccatgagttccaaacctaaaaggtctggtgtgcagcatccgcgaatcctacagcaataggggtcgatccgccagcaaaacagtggggtacacctcagtcgagatgggaggaacattgccagataatttcttttcttcttcttcttcttcttcttcttcttcttcttcttcttcttcttcttttattgatagtttgaataagaggggccttacctgacaatatcctttggctatggagaacagaaagggtctcctcgcaccagcgagtatgacggagggcaaaggtctcggggtactttataacccttcagaacgcggtgagaagactcgacaatgcagaagcgacaataagaaggggcttatgttcactgagaaaatgaactgccctgcaggaaaacagtgaagagaataagaacgtgcaatattaacaatgcataggaaggaagataaaagcgtggaaaagagaggaaaacgaagtagcaggcgagggacgggaatccaaggagaacggggagaggggggagagaaaggaaagggaaattgtaaatgaggtttcactaacagcgggaacccatcgcaagtcaaggggcgcggcacttgtaagttgtcacaggaaaagcgctcagacttcgagagcggtgacggttgcaaagagcgctccaggatctagtaagttattgctatcataccggttctacttcgatatttcaagtactctcctttgcattcgtgctttaattggatattgaacatgatatacggagtagggattcctcatatttgaaagaatatatttcttacactagtactttatttctatcgcagtcacatcacgttcagcgcccttaacaaacagccaaagggcctgtaggtccttcaggtgtttcaggtacacacaaggaagataatatccatcggatagaggatgcgtatcgaaggtgaaacgaccacgttcaataccttgaccttaagattaagtgagggttgtaccagcgggggaaataaggtacttttccttgacaaaaagatagggtagtcgttattgctacccaaatacgctataggtggactgacggtgtactccgtagatcacataaataacgagcctggacgagaaacccagtgccctgatgaaaaaaagacgactaccatgtagactaaaatgtgactgttctgagcatgctcagcaatctcacggggcttgcccccagtaggcattgaaccactttgatgaacaatcgtacacagaagataacctaagctgggtcctcactagagcatctactaaagtagtatgtctgttagaatatcccgccaccgttggatgtaccctgtcgctatcccttaaatcaattacaccattgtgtgtactgtgtattcctgatcttcaaagatagaacttcgacccacggattgtcgttccgtagatccaagagcttgggtggtccactcgcctgatacaagcaacctccttttttgtttctctctctaaactataatcaatagaaaaccgccaagtaaagatttctcaaccatacgcatgacaatagtacgtaggtcatatagacagtccaggtaaaatagagatggtctggtcacaagtgagaccgcccggagaagtcgttccctggcagtagatggttaggtaaataaacgcttaagaatagtacccatataatagatagaatatagatgatcctctgtcggttcatcatggttcttcaccgaaggggtagttaaatttgagcagcccattcaaaccgccaacccatccgtcatgcgcttcaccgcccataattcttctcatcacacacggcactcctccttgccattcatttttgccatgtcgcatctcctcattccatactcggacctccatgccaactgccattccctgacccatgttaaccccgtcaatactcatctctaattcacggccccgattcttttcactcagtttcagcgtaatcggtgtgctggatggtagaaccaaaggccggaaacttagactccgggcacagatcggggttagtagaaccgaaggcaccaagggatgcacaatactgccaccactactcaagctgtatgcggtactgcccgtgggcgtcgagatgatgatcccatccgccactgcctcagtaaggaatcgtcctccgacataaacatccactaccgcaagatgcggctccttgccacgatggaggagcacttcgttcaatacatatactccctggctgctcagcgtactctgtatagaagttgaacttcggtcttggtgaacaggtctcccgtcagtggtgaaaagccccacctttaagcggtttcgcatcaaaatacgagctccacggctcgagcccattgatttcccacgaaccgacgaccatcctgtagggcctgcctcagaatctgcttgataatccgtcacagtacacctcgatgcctctaacataggagctcgatcccctactcccgcaccggacatgtatacctcacgaaatgcgcgtttgtactcctcgaacttccattcgcttaaaaaacccagtgtacccatgctgaatgaaagcaccgggggtacattgtaacatgtagcgaataaggaagaagcatgcaaaatagttccatccccgccaagagtaaccgtaaggtccgccttactatgtagcgcggaggctagcctgctcaatggagctgagtagataggaaaagaaaattttgaatgtacttcttcggcagtcttcggctctaggatcagggcgatagatggatacgtagatgttacatgactagacaaaaagccgtcagttgtgctctctaaggtatcaagacggctcccgtacttcgcaaattcaattagtgattccgttactgttggcacgcagtcctttttcacaacaaagacatttcgagggggtgctggccattgaagagagaggagatcgccctcccaagattctgggaaagaaaaattagtaagacatagtctactgtcgtattgtttctcgttatctagagaggaagaagcaattctgtagttttgtagagacgcacaccttcgtatttaggtagtagacgttgaggtaacgtctctatatttctgatttccctgcggcaaagagaagatgaaaagggtcgcctccatggtgtgtacttgtgtatgctaatcctagaccgaaatgattgcgtccgaagaatagtcgcttgcatattgaggaaagagtgagtagctcagaataagacctttcatgcagatattagcgctgtaaacggcggctattttcattgatctaatataaactcacttgtattttttgctctttcatcttccgagcttaacttctgtgggacaacactgatctgaagcatggaatcgttcccttgtcgaacccttgaatttgtattaccgtttctgtaaaagaagaaggggggaaaggagtctgtgaatgaacgaaggtcgctccggttctttgatggggtgaagaataaggtggtccacagaatgatctactactcctaattgaagagtctgaccgccctgagagcctgacgtatgagggagcaaacgtcattaaatcggcaggttgtatctagcagtggtggacgtcttggctctcgggttcacaagatcccaatcgttgcggtcaggcgttatcccgtacctagttctttccagctcctacgtaccattcattctctgttttgaaatttgtccctcacttcatcctacatgcattatatataggatatcctctggtattcttattttaccttgcggccctaggcatggcctgaactggtagacatcaaactggaaagtctcccttaatcgcccaacgtcttgtgagaatctttaaaccaatctttcgcgcgagtacgatactgcctttccttatatgcaaccactcgactaatttatacttgcttgatgtcaggctaaggataaattgacaccgtaacagagcgtctcatctatcaacccaacagaatccggtgctcttttggccactagcgatccaacatgacgggtgaccctagctctgagcctcaccagcaaaaagagagctcaacccggcaacgcatagggagcacggatcaaacttctcgggctgacgatgacatggaaccacggcttaaacatgggatcccgatgcaggtgtttcgatccctcttgcttgcaacatggttcaactgctgttgtgttgtcatcctagtgactcaggtgctaggtgctcctctctatttaataagcaaggattactattatgcatacatggcatacacgaagcagtccttcgggctggtcatcacagctctcacacaatggggctgtcctacatttgttcgagttagtggtgataagagtgtgcaaggccagattcatctgacagaagacggccggttgaaaactgaatttccggagcgcttggttttgattgctaaccaccaggtttataccgattggatttacttgtggtgggttgcgtatacgaacattatgcatggccgcattttcatcatcctcaaagagtctctcaagtacatcccgattgtcggtcaaggtatgacattctacggttttattttcatggctcgtaaatggctatcagacaaaccccgactacagcatcgcttggagaagttgaaaacccggcattcaggctccaagtcagaatcgtctgaatacgaccccatgtggctgttaatctttcctgaagggacaaatttatcaattaacactaagaggcggagtgatgagtatgggcaaaagcaagggtttccacctctaaagcacgaggttctcccgcggtcgaccggcctttttttttgcctacaacacatgaggggcactgttgattgggtgtacgattgcaccgtagcctatgaaggacctccgtaagtccctatgactgttaaattgtcttttgaaaaagaaagaagaaaaagagcccaccactaactcctgcagcagaaaaggaagctatcccgataaatacttcacgctccgatcaacatatcttcagggaaggcccccaacatccgtcaatatgtactggcgtcggtttgctgtatcagacatacccttaaatgaccagaaggaattcgatgcctggctcagggcccggtggacggaaaaggatcagctgcttgatgaatacttcgagacgggaagatttccatctgatttagcaggctttgttgacaatgtggacgtttccgaaagtcttaaagctgccgccgctgctggatatgtggaagtatttgttagactgggacattggagtgaaattgggcgtatattcatggtattaataggcgctgctcttctgtgcaaagtaccaaaactcttgggtttttgacaagcaagggcttgccttttatatgtctgaacactagctcttcttactatgattatgagagatgcatttagaggatggtagttttcgtaaagagtttcactttccctctcccagtctttgacgtacgattcaggttgataatgcgagtgtacctgttttctttctctctttctttctttctttctttctttctttttcattacaggaaattgattatttcttgactgaaaatgtgtgactagtttggtagagctgagaagatatcgaagccacatgtggcggtgaaactccagcctcagcacggactgcagcctcaggttccgaccctttcaatctactgacaaccgcaccaagttgagagcaacactacaggttttgtcgtctcaagttgctgctgtaattaaagaacgctcttcctgctcagggtctcagcaggaggacgtgcttctcattctcactggcaattgtttcatatagtacgatcatgagctgaatcttgcaacaatccctactccagacttccaccacaccttccgtgtttcatcgacttccaaaagaatacctctcacgcgccatggcgtccctacgaagtgagcacaccaatggcgtaaacggcgaaacacaccccacagttaaatcattagcgaaccttcgtttttcggacattccctctgccattgatattcctgcatccaccctcgacagcgaggtcgaggtcagtttggaaggtcttccagacgatcctacggagctttgcactctactagagaatgaaaaggccgcaaaaaatttctgggttatcatcgcgctcgcttatgccaaacagaagcaaatcgaccatgctatcgacatcctcaacaaagggttgacatcggtcgctcatggagcgacgaaagagaagctcggcttgctgggttgggtatgctggttgcttatgttgaagagccgacaagcgccccgagtggcacccgaaggggaattgtatgctgaggctaaaacaaaggaccattacctacagctggcgacgtcaacattaaatgaggcatctcgcctgaacccagctttcccacccctgtttttagcccgcggagtgttgtcccttctgcgcgcatcgttgcatcccccgaggccggttcgtcctggcacagttgacacttccgaacgtgtggagtctcttagacaggctcttaaatgcttcgaggagtcttcaaaggccttcgggggtcgaaatgtgatggcgattcttggtcgcgcaaggacacagtacatgcttggaagatatgcagaggcactggagggttatcagaaagttttgatgaagatgcctggtttaacagaccctgatcctcgcattggtattggatgttgcctgtggcacctaggctttaaagaccaggcgaaagctgcgtgggagcgagctctggcattggtacgtggatcctgcaatactatttcaccacttgctgatcgtgtatgtgctctgtagaaccctgactccaaagttgccaatattctactcgccgtctactacctctacgatagttcccgacacgccacgacggatcctgcgtttggctccttgtataaggtggctatgacccagtacacacaaaaagctttcaagttggataaagaataccccatgactggcgctttgtttggggggtatttccttttgaggaagtcatactctacggtcgaaactttagcacgcagagcgatcgagcacacggacgtgatgcaaatagccagcgatggttggttcttgctcggtcgtaaggcacattacgaaggcgaccttactcgtgctgcagaattctataaccgctctgaccaagctcgaggtggtggtgataaggggtatttgcctgccaggttcggcacggtacagatgcaagtgtctaataaagattacgatggtgccaaatttcgactggagaagattatacagcaaactaagaatccagaatgcatgatactgctcggagcgctttatgcggaggaggtctttaccagcgagagaattggtagcaaggaagacaagtcagccgaagccaaaaaggcgatcagtcttctagaatcggttcgcgccctctggaaggacgaaggcaagaaactctcacctgaagagtcagttttggtgtatttggctcgcttgtatgagcgtacagcgccggagaagagcatgcagtgcctgtcccagctcgaggaattgcaactggcagcaattgttgaggatgaacatcgagaaggtcttgaaaatgaggagcagctcaaagctgctcttcgagtaaacctaccgcctcagcttctcagcaatatgggttgcttcttgtaccaggctgagaaggtagaccaagcacggactatgttcgaaatggcgttgaatgcctgcgtccggtcccaggagaaagaaagcgagcatgacacggacgccctggtcacgactatcagttataatctcggacgaacatacgaggcctccgacatgccggaagaagcaaagaaggtatatgaaggtcttctagaacgtcacggtgattatacggaagcaagcgctagattgacatatattgccctacggcagagccccacggatgagggccccaaaaggatggccaagctgtacgaagcagattcgactaatcttgaggtccgtgctctgttcggctggtacctcagcaagtctaagaaacgggttgcaaatcttgccgaggaccaggagcaacgccactacaagcataccctgcaatacttcgacaaacacgatcgctactcgttgactgggatgggtaatgttcatctcatgacagcacgtgatatgcgccgtgagaatgatcaggagaaagagaagcgccgtaagatgtacgagcgggcagtagaattcttcgacaaagctcttcaactagatcctcagaatgcttatgcggctcagggtatcgccattgctctggtagatgccaagaaagactacagcactgcagtgcacatattttcgaagattcgagacaccttgagagactctagtgtctacctaaaccttgggcatgtatacgcggaactacggcagtacacacgatctatcgaacattacgaggcggcgctatcgaaagaccgcgctcgtgatgcgcaaattctagcatgcttaggccgagtatggctgttgaaaggaaaacaagagatgagcttgtcggctatgaagaccgctctggattatgcacgacgagcgcattctgtcgcgccatctcaggtgcatctagaatttaatgtggctttcgtacaaaatcagatcgcctctctagtatacagtctaccagagacgcagaagactgtgcaagatgtgcaggatgcgtctgatggtcttcgtgaggcggtcgaatctttcggacgcattgcccaaaccaagaaccctccttacccagcgggagccttggaacagcgagccaacatgggcaagacaatcatcaaacaactcgaacgagccctccagagtcagagggagtacgaggaaaagaatgcggctaaacttcagcaggctcgcgaggctcgtgaagccgagatccggcggcgcgaggaggaagttcgcaaggcgcaagaggcagagcgcgagcgcaaacagcgagttgcagaggaacgtcagcgaatggtggaggaggcacagcgattagcggagcagcgggcggaggaggaacgcgcacgcgaggaagcggagttaacgacggaatcggagacaggcgctaaggtgaaacgcaagaagaaatcatcttcgactaaacgcaagaagaagcgggctgaggacgacttcatcagtgacggcgaatcaccgaccagggctggaagctcagagccggaaagcgagggtgaagcggcccccaagaaacggcggcgactagaacgtcggtcgggcgggaaaacgcagagcaagtataagagcagtgaactggtggtggattccgacgaggaggacgggaccgaaaacgccacaacgccggtggcggaatccgatcacgatcaggagatggctgataccggtgcagatggagatggggaaaacatgattcaacggcgccgagcgaaggtgaatcgtcggattgctgacgacgacgaagaggaagaggaagaagagaaccagcccgggacgatggcagtattagagaatggggatgatggtgcagatgatttgttcaacgacaacgcgggtggtgataatgatgcggcgatggaggaagagtgaagatatgctaaggcagcattcttttcctccattattttgtagtgtatatctctgctacgcttttactttattctgtatcaagaggatccaggcgtttggagaattggagacaaacctggggcatgttaataagcagtattggaacgaaccatctgataattccttcactattaattacacaatatcaggaaagtgaagctctattgatttgcaatgtagagaatacgaacaggctaatctcgaggcaaatggttattcgagattgatgttcggagtatggttctgtttcaaacaaaagcaagcaaatataacctcctggagaagcaaagggcctttgctcccagtccttcagagtaactagcctagtgagtagaaaattgcctcgtcagcaccactagagcgaagtctagacacagcgatcgtcaggaggccgaacgatggagaacatgtgagacacgctaaacaggctaagtaggtgacggtccatactagagccagccagaacagaggaagggagagtgggagaaaaaaataataataataataataatagtaactaaggcgtggaagagacgggttgcctgtaaggttcgtgtctgagacagtagtgtggcacttaccctttttttttcattcagatcggatataagataggtacggagcacaccaaaaaagagtagtagtagttaacactactgaatatactgtacatacctgtgtaagggtactcagcatccatgtatgagatacaggaagtaaggagagggaacccaagtcaagtaaataataacaatataataataataataataataataataataataataataataataataataataataataataatgacagtaattgattgagcaaaaggaagaaatatcattgattatagatagaaaagctaaagaacgtgccatcctgcacggttaatgcatgcaggtatacaggcacaggaacgccgtctggcggtgtgatcagcaagcagatatgacgtgggtatgtatggtgtaaatttagacaagataggaggcaatcctgcaaggtatccgcgtaggtcagcacataacccataccagacgtgaataagagaaaccgtagtagacataccacacagaaaccctgaaggatattcgaaggcattcgatatccatactctctactatggattaagtgaaatagtctatagggacggatggatcgatattaaactgcgagagcacatgcccatctttgacccgaggcatgcctactcataattgatgcattgctgtgggatcaaatcctcgaggctcaagccctaaaacagttccgcccaattcccccgacccaaccaacattctggttcatcgcatttacatattattgaccggccacccccgagcaggctagggcaaaccaacctcgtctaatttaggctctacgtatcctgtacggttatccaggctagtagtattgctaggtatttccttagtactattccgtacaacagtccacccttgtgggtatgacaccactggcgctacccatcgcaatagacccgaccacggtttttggaccatgctattcctctgcactacagattggagcttcaagccgagaggttaaaaatatgcagacaggttacgaacacaacaagcaaatcagcagataaccttggaagaggtatttgtttttttatttttttttatttccccccccccctcgttctccttgttggtgggacgggggaataaacaaaaaaggaaaaaaaagatgaatgatccagttcctgcactagaaacaataacaatttgctaacgcacttggatccgctggacaggcataaagttcaaccaggcagggaagttggcccattaatgtcattgtctagcgtcctaacttgacccagtggagagacgttggaatgggtccacgtctttaagcgaatgatgatccggtgcctggcagtcgttctgctgggtacttcttcctttccctcggaacttctcaatcgagtgcctggcgagtggcttatgctgtaatatactgtatgacaggtgtttagaatgttattcttacaaacccatactctgtacacgcagtcagtgataagttgaaagtttgaatggtgttgaagacctgtggaggaaaagggaagagggagtcggcatacctgtatggctttatgaaatatgtctttcttgactcatatctagatactagataaaccattgtgcctatccttttaagatctccaagtaatagtcggtaggatccattactatttctatcatctttatctatcgttcactagttgcctatgtttaatctaacaagccccatttatctaccgtcgattcttgcccaacgggaagccccgtatgggatcgctcgtggctgactggcataattcttttccatttccagtctcacgatcagcctactgggagccgatggaagatactagactggacctccatctgcagtcctttcagggtaaccctggacaaggcaacgtaatagctaccgaggttagagtatcattccctgtcagtctgcctggctagcactaatttccaatccggtcaaaatccttgggggtaagaaaaggaggaattgacttccaggtccctagcccgtaagcaccaattccgatcgatcagcaacacgggacaattggatccatgggtttgtgattttatggccttagttcacagttatgagtacctgcgtcctgcgcgtctgggttcctgagcgtctgtgcgaacgattcctagtctcaatagactactccgtagaatctcctgatttgatcgtctccacgacacgcagctcggtgagcggtacccggccttttaccttgtccttttccctttgattcttctcctcctccttttttggaggtttcctcgtcctctattgtgggatatcaataaattaaagaacacttctaggatcattaccaaacaagtaggtagacagatataaaatacacattttgttagtaccccagagttcagtgcgtcatcgcatagtaatttcatttctaccaactcttctcttcccctccttttctcctttgcgtttcatgtatttataaagttatatgtcatacaaaattgactgtcggctttgtaaggagcaaaaaaaaaaaatccaaaaaaaagctcgaagaagaaaaataaaagaggagataaattaaattactccgtacggagtacaatctgtgccttttggaaccgtcagaacgtggaatctccggagctgaagtaaatacaaaattacaccaaaataatgagcagcacgaacataaaatcaataacgaaaaattttataaaaaaagagtaaaactaacatccgtcccccaaatctttttttttttttaaattgttttcgatactttttctccatcctttctaaccgtcgaactatactaataattgttagttccctcccttaattccttttattattgtccttgccattctcctcctcccccagaccatccattgactaactattgatcgatccgcttcgttctttatctattgattctatacctccaccatctttcttttactatccctcactcagattctcccctatataccattatccctctctgtattcacgatcacgatccttttactcactagagcctcttccccattatttcttgcatattcttcttctgttgtgaccattgttgcttcgtttcatattttccaactcccaaatttatgattcagtctttcctcgccgagtggccttgcccctaaaatctaaatctaaatctaaaacacttcagaaactcttccacctggaggtgccatgttctgttgctcctgatccctagtcagctttacctatttcaccgtttaattcgctctttttatcttctaccatggtcctagccaggaccagcatactgcaattacatgcttgactattagcttgtatttcctccccattcgacctcgccaattggactgcggtaacagtctactatgcatgcctctagctctgccccacgaaccatggcggattcagagcaactcaacaccagagtgtccaacaatgacgctcctgatcattcaattcatatccgctctcgatcaactgcccacacccaaagccccaaacgtttgtctgtcttcagcggtcgttcccggagcaatacaactacttccaccacatcatcacgccgctcccccgcctcttccatgacatctatggatgctgcctcgctgccctcatctcaagatgaacggacttattcggccggcgtccgctcagagcggcaggagagtatgactaaatcacttttctcacgcggaagccgtatcctccgtcgccagggaagtaaatttaatattgttgccacgctggatgaagaggatgaaatggagcgcgagaaatcccggtttgaggtctcagacctcttcagccgtcaccacaggtcgcggcagagcgatgctcgtaagcgcacctttacgcgaatggcacaatctggtactcataactaatctattgcagatgaacaactgaaaaatcttatttcggacccctttgacttccaccacctaactcatacgagtccatcccatttccaggagattgacggggcccgggaaaatgatctggtcactgaattctccgccatccgtgcctctcaaagacctgtcacaggactaaagggtatccgcgcggaagatcttcattttcgtgacttctcgtccgaaaacctcgccaattgcgggacaggcattgcaagagaccacactgttcccgctccgattagccctcctaggtcgccaggaacatcgtcgtcagcagcgagccccaagcagcaagatgataagctaagaagggagtcacgagtctgtgagaacttttctcggccgtatcccagagtcggtgcaactacgccgcccgggttggcggcatctccagaaatatctgagccagctcctcgtgccattgacgagatactgggtctgtcgtccccatcaacgtatccagaacatgtctactcaaacgacgatgacgaagcccaagagcgccgtttactccacatgaacgttgaaagcatcttctcaccgaccattggacaggccatcattcccaacgctcaaaaagacacgattggtctcagaacttcgtctatgtcatccactaacatgtcctcagatcttgatgtccttccagaggaagaggaggctacccatttaagggaaactttggcgtctagtatagaggaaacggactcgcgttcccagtctcagctaagctcacctgaaactgagctgcagagcacctctgtagtcaggcctaagtctgatctatccgtatacgtgactgaagaattgtcgaagaaggtttccgaggctctcggctctcctacgctccctcaacatcatcagcccgaggcaccgcagcacggccaaagactaggcggaacggtgaagagaacagcgtccgttcgtcgaagagcaacatatgagaccatctatgaatcttgggatgccgacattgactactgttacgagcatgcagcagagtcaaattgtaacttcgactgggctcgtaattcatttgatgaaccacaacaggacgcaattgacgtccgcatcacgagttcccaggtcgatcccgtgaatggagccaacaaaatgcacctgctcccggccgcgcatttgagcacttccacagttcctagattggatctggagcctagtccgcccccttcgtttcccagcgcgcaagaatccttaactccgtccaccgcaagttgtgaaattgaggaaggcggctctcagcggaacagtgattatttccaaccagtcagttcttcaatgtttccatcgaccttgggaaaacacttgacccatgataccctatatgaggagtacctggcaggcgatgctgaatcagatcggcacttctccttctgctcacaaggagtgatccaacccatggaacaacctgtctcaccccggagtagtttctctccgatcagcaaatgcaactctgaagagagcctaatcttatcccgtgcggcatcaattgtccgcaagcaccgttcttccgtctcgaccactagtgttccggagcttgtgcacagcttggcaaatagccgagagttgtccacggtagaccaagccacctcaggcgatcactctctaccctccgggcctggacaaccggagccgtcttatcatcgtcaaacgaaaagcctggcaagagatatcgagactcaggttgcttttcgagctgatggcagtttgattcttgaatctgctgggctcatgccaaattcgggtcctgctatccatgatcgggcaagatcctcatctgaagtagaggcgaccaaggctgaactccctatcagaggaacacatcggcgaaagggcagatcatcgtactcgctctttccgtctcccgcaacttccactaacgtgctgtagttgcaccatttctagtcctgaagcgtaacttggacataatgttcttttcttttatcttgctccttcacactttcatatcaatcaccgatagatctcttcaacgacatgatgacttttcatttattctttctgcaactttcccttctttattgttattcttttcaatatttcttcctgcaattgctagcctttctatgctcgttcttttctcatctgcgtttactcgagactttcgttttgcattctgagcggctactttttccacaggaacacaaaatttctgttaggtgtttttctggtatgaaagaattgggaaaaggctgcgaatgggttttggttgcatagcattcgctcgaaatttctttgctttgtatttgggtctttgcaggcatcgttctttttatgcgtttcgttgttgcttaacaagttcatcagttgacaaatacggattgaccctggtatatagaggagggcggtttactggtccggaggttttctgtccggattttggtggacagtggaaaagtgaaagcatcatctaccaagccattgtatgtttcttcgtgtacctggttcaataggatactttatgtcatatgcaaaagttacttgaccagataattgaaccgtgaggatttcctagcgaaccatagagagacctgaaatgtcgtcacttgcttatcaacgctcaccgcctcaccctcagctctgccactctttctccgttctacattcagttgttcacttatacatcccacccatgtagtattatgttcttaacaggttttttagctgaacgaagtcatattcatttgcgttgatctttctaggcccacggttacccttcgctgcaatgtcttccacatcgcaagctttggctaagcgccataccgaaaccagtctaatgccccctcctccccccccgaaacgcattaaacgacctgctactgtccttaacgaagatgtatatacaaataccttatctgacatcattgcacgagactacttcccggggcttctggaggtgcaagtgaagcaagagtacctcgaagcaatcgactccagggacaaagaatggattgctacgtccaagaaaagacttaccgacttgatgttgactccggaaagagctcggaaccgccctggttcatcgggccccacaatgacaaccaaccctacagaagacaggcatgcaggggatactccttcgggttggggtggggatacgccaatgtcaatcgtatccatggcctcttcatcacccgctcagcatttgaaagacaataatgctccaagcctgtccaatctcgggctgctcgagttccaagcgaaatataccagtgaagataacgagtccttcaacaagctgctagacaagcaaaatacgaaacgtcgagaaaaatatgcatggatctggagcggcaacaagatcccgtccgcgcgacagattgcccattatcaacgggaagtcaaacaaatcgaggaacagggtcttaatccctatcaagacaagcaactagcaactaagaaggaccttgactctcggcccgcgaaaccggactcatggaaggccagatcggagaattctctcatgttcatgccctcgtctgttgaagacactctcgagacgctccagcagaaagcagaagcgtcctcaagggcagggcccaagcgggtggtgtgtcagaatacccgactaccagatgaggggtttcaagctgcacaagatggaggcgcgcttccgcctttgccatcaatttctgctattaaggatgctattgccggacgtccctgccctactaattcagaagcgggctatagtgggagtgagacgccacgagtgaatggatacgccttcgtggatgaagatgaaccagattacccaataaacatcgtgtcgaaagacagtcatacggactttttagaggaccttcgattgttgggtacaggtgataaaaccccaaatccgtttcaaatcaaggagaaccgaaggcgcgaagatctccatcatcgcatagtagaccgcgttgcgagaaagaaacgagccgagaaagttgcgcaagagactaaatctccagtcaccatgacgccgcgtttcgccagtagcccccggctagactttggattgcgtacgcctggcagagcaacagtgggaggaggtggatcaactaagttgttgactccagcagcacaaaaactattacaccgtatggggaacactcctcggcccacagagtcgtcttcatcgaacctgaagaatgtatggactccgactccacgaagagccaaatagatacgaattgcttgttgggaagtagttgcatatgatctcttgaccaacggcgcttcaatcgataccatggtagaccggcgttgtttcctgctcttacacttaataggttgtgaggcgatactctaattaatgatgtttaggtagccataacctaaaaagttgtctctccttcgtgccctattgataatcgcttctcattagaattatccatcctctttcctggcccgaagataacatgtctagttgagtataggcagtggctataccgacggaaacagctgtaaccagaaaggtttatattggccaagggtatcaggttacaaggatatatgacacgacactcacaagtaacagaacaaagttgaccaaaatgatgaggttccaatcgaaaaagggttaatggcccacgctatacatcatggtagtatggtacgagttcacgaaccgccaagtgcccaatacgaaagccaaacagttacaagtgcaaataaacccgaccgcaaaggatttatcttatctccgccacccatgaagtacgctgcgcctacccaattgcaggtgacaagatcgtcggggccgcgtttgccgtacgtggaagtgagccatctgccctgcgggcagctaaagtccagagcagcgggacagctcttgacgaggttgtagcaggtgtcctcacagggaagaatctccttgtagggtcccggtcggatctctttgtcaatcagcgaattccgggaccgattcgtcgaggtattcaactgcagtgtgtggttgtcactgagcgaagttccgttaatgaacttctgtccagcgtttctaacctggagaaatctgctagttcttgaaaagtcttcgcaccgagggattgttacggcgcataaccactgtttgtatgccctggcacagtcatcgcatcccaccgccaaagaaaaccgagtctcgtttgtagcattacattggatctgctccaaagagtaagaaaagttcttatacagtgcagcggcattatcatcgtagaatgaacggaggccgtctaagttaaaagtcgggttcgaaggcaccgcatatgccacttcattacaaaatgacaggttgtagaggagcgcacaattgccatctttcgttgtcagtaaccttaacacccctggtgacgctgaaaggaatttaattacctgctttagttgagaaggtgatcggtttccatattttcccaccgccgccaatgacgccgtttctagaaccagtagaattgccatccagcgctaaaatcccttcatacatcgaacttcggttgagcccggtgatatataactgctccttgggtttattgccggggcctctgctcgtcatgcttgcgttgatattaccatcacctttgcctatttgggcgagtcgatcgagcgcacaggaggaatggtgtaagccagagatagctgtatcgttaatgttattcgcaaacattgtgtacggcggcgcaatgcccatccaattgttgtagccctgagagcccagttctgcctctgttaggttgcccgtggtgaagagcgcactgtgcgtgtccgaatccacaaagtacaggaaagccggatcgtgcgcgaagctgtggaaaaaagcatcaactgaagccgcaagctcatagctgtaggacccagaatattttgtgctgttatgtgcagtaacaccgatataaacatttccctctacctcgacggtggcgcccatatagccctcttcgaccatgtatttagtttgattcgacctctcttgctcaggaccaggcttctgaagcaattcagatgtagagacgtagacctctagatgcggcaggtctcgagcactgtcagaaccggctctattggagctaggcttcgagcatgctgtcagagatatgaagacggtttccgaacgcttcgattggtcgctagttggtccctcggatgtcttattggtattcttgtcttttacagagttctttgagaagtaccaccactgggtttcgcctaatttaacttcgcccttttgatattgattattgcctagggatgagaccccagtaggagccctgcggacaatatctagacctcgcaaatctccagcgtcatccacatcgtcttcaatcactagaccattgtaagaccccaatgggaaggagaaatgtgagtcaccgtcattaatagtcaagttactatggatttcaggggccagagaagtgagatctgcggcatggcctaaacctgtggtcgaaagagccagacagactatatagtgataaacaattgcgctgatgcatggagcaaaacagcacaaccaacgtgcgagctcaggtcgcatggacaattcagtagatattggctctgggttgggtaatataaaaaggaagaagaggaagagaggagagtcaaggaaggcttggagacaaggccacgacttcctctcacagccgaggtctgtcgagtcgtaagcgaatgttgggaaacgtggcaggaggaaacgtcatccacgaactaattcaggctcattcggaagctaaatcttatatacaaagtacttgcgcttggcaatgcacgttctagctttcagtatgtatcgaggccgtcttttctgcctgcggattccgataaattggactgcgccacatcaacccgccagccacagtagcccccttcggcgccccggaaagctaaggagaacattttctattactaaaaatgtgtcatgggtatgcatgtatgtaatgaatctagatatctatatatacgcatggatactatatttgacagcccataagtttctaaatagccaagaccacatttaaatcttatacaagcttgtagcagcgagcagcaataccgctaataatgactaccgccgcaatcacaccgacgatgccaaaaaaccacgcaaggccttcctggccctgaccagggactgtgacattcataccgaatagaccacagataaggttcataggaactaacatggtggcaatgagagtcaccttgctgaggatcttgttgacgtggttgcccaaaactaggtttgtgacgttcagctgcgcaagatagttggtgtgtgatctgctgagcatcttctcaaaatgagccaggttagacatcatggtcactacatgatcttgaatatctcccaggtaaaggccaatgtcaccacgcggtgttactgagtactgttcgttgcaacgtttagagaaacctcgaataacatccgccttaccgcccaagaggcgcatcaagctcatgacctttttgcgcaagccaccaattcgtggcaagaatgactcaaaatcatccatacgtgcgatgaagacgagatcttcaatcgcctcggactcgacctcaatttcgcggattacagggccaaaactatccacaatgtcgtcactacaccagacattagaattcacatacagacagctagatggcgatcaggtaacatgcatgggcttataaaggaggaaaggcggaataagaggggcttacatcatggcatagcaaatccagtcactactaagtgacacatagtcacggagctttccgattcttctccggacattcgaagcatggggattctcggtaaaagagaacgataacacaccatcgcggaaaacgatcatgtaaaagttgacgggctccatgaagcgctcgcttgtcttgtctatctggtaaaaagtccggaagcacacaaaatagtattgcttgaatagctcaactttctctcgagcttcctgggttaaaatatcttctgtcgtcagtgggtgaattgagaaggctctcgaaagagcaccaacttcggcttcagtgggattcaaaacatcgagccaccaaacgcctccttccgggccaagttggaagaggtctcgaaaggtgtccccagggaaaactaagtcgcccagttccgcagcatgtacagtactctgtgactcggacgagaagaagccgaaccgagtcggctcattctcatttctgagattttcaactaattgtttttcgttgacagcatccgcgaagactttctcgctgtctttcaagtcgagtccaataatgtcatctgatgagcgctcaacactcgatgagcgcttcgcttcatgggcttcggacttctgggcgttcggacgaagatcgtagaaaacacgagacttcttgctctgtgagctaaggctgtgcttgcgccgcgttgtgataggcttcgtcttctgattaagagccacaaactcctccaactcttcatagtcaatcaccggaattctgcccaattgttcaaaggggggggcacatgtatcctcaggcgaatctaattggatatcacctggttgaggtctaatggcacttgcattactgaaggttgggcggcgaggatgtgtgccaccagacaccgtacgctgtaggatagcttccaagtctggcgctgcatgactctccagagtgttggcacgctcccggcgccgtgggtctgcaaaagcttcgactgaattgggcggagatgttgatctagctgaaaccgacgaatccctcgacatatttgcgatatcctgatgcgtacggctaaaggcacgaccctgacgaatatttccggttggatcaagggagaagcgtcgtcctaaaccattgacatccttaactgatcgatcatcgtctgctattgcttgctcaaagtcccgagagaatggccccgcttctcgaagagcatcctgaacttgctgaacttggagcagatctgaacgctgtggcgtctccatattcagattctgcggtgtggtattctgccgactaagcgtcatatcgggggtagcttcgatacgaggtggatccaattgaaaccgatggtcatccagttcaggcactggcgtgctgaacctgcttaaaaacatgtacttttctgacttgggtgattcagacattttctgcgacgctgaccgtcaaccagaatatacaccaggcttaccaacccaaaacgtggcagtctggggtgacaacaaaggcgtatttgcgttgattgcctcaactgttatcgatgccttccaataaggcgaaggcggatgtacaagtcccaagggcaattgctcctccgtccatcagccagacccctcgcaagggcctggcattaccgacgcgcgtctgtgtgtcagcttcgaacttgctggaagagaccggttatgggggtctggtgtcgcccccgcagaagaccctgaacttggggcccagaagagggtggaggaaagaggactgatagtagtgaatgcccgccaacttgactgagtagtacgaagaggagcgctgccgctccagagttgcagtgaagtggtgagttgtgacaggataaactcttcagaaagagtccttcagttcaccgcaaaacttcctatcaatgaatttgataaacccagaggctccgaggtgattgcgggcgttgaaagagggggtctatctacacaccaacaacaaaaaaacaaaaaaaaagaagaaagggaaaaggagtccaaagaagaggttagagatccaaatgtaggacactaggaaagttttaagatctgatgttctggtatttggtgcagataggctgatgtgttcagagatgagtggcgggaatcgtcaccaactcgaacttggagaccaaactctgatgtcgcaaataatatgttgttcccaaaaaaaagatatatacgcccaacaacaatgtgttaggcgaagggacagatcacgcggacaatggagaagaaacaagaaaaaagaggaaaaaaggaaaaagagtatgaaaacctgcaggaggtagttggtcacctacagaggcgagtcgagatgagttttctcagagacgacagcgaaaagggaatttgtcgtctttaaaagaaagctgaagcgtatcggagtacggagtaaagaggagggaaaaaaaaaaaaaaggaaaagaggggcgcgggtagaaatttccgcttggggttaaaaaagtccagagccaccgcactaccagaaatctgttactacgtactcttactggggccgcatcggccatcctccgcctgggttatctactaagttttgaagtgaaggtcattcgtagtatagttacgaataaatcaaaggtagcatttagtactctttagtgaagatggaaccgttaagtagtatcaaatgtaattagaaaattcagatatcgttatcttcaattgttgtaatagatgttacgagcgattttttttaatatcggaaccatctttaggcagcactcataccctatgctgaagtctcgccccgtattgaaatgagaatttccagcgtgtgtcaattgaagattatttggttagggttcggaataggtgtagatattatttgattagtgtacagttgtcctgcatgacgtgcagctcataggatggatcgtaaggtgttgaatatcggtcacttctgattggaatctagtgtgttggttaggatacatcaataatctagatctagtccgaaagggaatagtcttatagcttggcttttttgcccaacgggcggactaaccgacagccttaactccttctattgtcccgaaatcggcgaacaaatattttttcttggggcatgccaagaaactgatgaaagagtcatactttctcaccggtggcagatatctttcaaattacatacatatctaaatacccagaaaagaacagtgcttcgaatcggattgatatgacaggttaacccatctcttcattttgttggataaatcttttacggttgattgcattgactctgccaaatcgttcgtccagtcaagaaaatagaaagaaagaaagaaagaacagaaacaagtgatagggagagtaagacacacacacacacgcacacacacacacacacacacacacacacagagagagagagagagagagagagagagagagagagagagagagaaagagactcccttcacacctctcttttccccacaatggcttcttcattcgttatcaaaacaccctgttcatctgccaatattggtcctggatttgacgtgatcggcctggcattgtcgctccacctcgaactccatgtcactattgattccaccaaagcctcccaatctcctctgaattgtgtcgtcacatatgatgatcaaagcaacagcgcggaagagatcagcctggatccagaggtaaacttgatcacccgtgtagctctgtatgtacttcgatgccatgatcagagagcgttccccgcggagacccatgtccatattgtaaatcctattcctctgggtcggggtctcggttcgtctggtactgcagtggtggctggtgtgatgttgggcaacgaagtaggccgcctcggattgagcaaggaacggctactggattattgcttgatgatcggtaagtttggcctttgaattattatttaatcccttgtaattgttttgcaagccggcccctccatatgaaaaatggatcttcttattgccattagcttctcgactgattgacttactcctcaacagagcggcacccggacaatgtcgctgcttctctctttgggggctttgtcggaacttacttgaatgaactcaagcctgaagatatagcccgcatagagattccactgagtgaagttttacccgccccggccggcggtatcgatactgggatacggcctccagagcctccacttggtatcggccactacaggaagtttcagtgggccaaagagatcaaggctattgcaatcatcccagattttgtggtgccaaccgccaacgcacgaggtgtcctgccgactgcatattcaagagccgatgttgtaagctctttcttcccattttccttatggtcgaacaatagacaagctcctaagaactaacgtatccctgtaggtcttcaacttgcagcgcgctgccttactccctgcagcattgggcacgtctcctcccgatccagacatgatctatctagccatgcaagacaaggttcatcagccataccggaagacccttatcccaggtctaacggaaatactccaatccatgaacccgagcacgcagccgggtctgcttggaatatgcctatcgggagcagggccaacaatcctagctttggccactgataggttcaccgagatcgcagaacgtatcattgctaactttgcttccaataatataacctgccaatggaagctccttgagcctgcccaggatggagctacagtgcattattaacatcactgcctttcatcatatgtggcttctagatagggataattgggggcagggagcgaaaactccgtctatcttaaccatggctacgctctaaatggcatatcttcagaatgattctttccctcgctgagttggtaaggggtggtgggtgaagtcagcttttttttagcaatattttttgtagggttcttagagaagtatataaaataaagttgaggctgtgccagacttttgccctttactttatctgactacatcctcttctttttacttttggtagtttctttctttcggtttctggttcctctcactagagcagtgccccaaattggttacgccagtttgacaccttggccaaggcggtaaaggttgaattggttaatctccgccttccccattaccaggcataccaactgtcatcttcagcattcatagtttttatttgtcttgttgtttatcctttgttattattactattattgttacatccatccttgtttttctccagggtggggaataccaaaacatttactagacgcctcttcgccatggatgatgttcttgcatctgtccagaatatctgcgaaggccagatagtatgtttgtcatcaccaccagtccgctcgtataagatgataaccaggcaactttacatggataggactttcacggccagcgcatggctgaaatattgtctacggctcttttaattatatctggggtaaagtgctagcctatccctgatcttactttcaccaattatggtcaacagtgataagatgggcatcattcgcttacgctcggtcgtgtcaaggttgttgctttcctcgccggatatatctacagggatatacatctcacactctgggtcgggttggcaggtacgctggtaactggactggccgccatccctccttggccgatgtacaataagaaacctgagaaatggcttgttccgttggccgggagtgtcggtggcgtacgggtcacggtagatggaagtaaagtggcatgaaatacaagctggatacaggggagattgactcgggaggtatcgagtcggacactatttatctctacacaaccaagaagccgcatttatcatcatagtaactaccgcaaaggtgtgaaaaacaaacccgaacgccattcagaccatttcctgcccgcctcttgcatataaaaatttatggcatcatgtaggtggaagcttcagcaatcaaaggtcctctatagaactgcttttaccggccgtacttctgaaattcccagtctcggttatctaggggacaaacctggcgagttttcagccaacgggatatgcagtggaaatggaacgcgtgctagagaagaaaaagttgggtcagtattaaatttgtcaagaagcttgggatatctggactcacattgcaaatcccccaagcaactgtacactcttcggtcgtagatgaaccttggtttgcttgacactcgatacctaaaacacttatgtttagttatacttctgcagtagcgaagagcaggagtcatacacaggtccatgatatgattacggcaaattgcgcaattgtcgacaacgatatcccacgcccatagggccaccgcattccatttcttgacttcgaacttctttttgccatcactcgcaccttcggaggccttagatgctccctttcccttggctgaagcaccagcagacgcttctttcatctccacatcggccatcttagatacctattaatgtcttgactccctgggcctgtttgttgcgatagaagtgctggaaataccgaacaactcaaggcaggaaggccaggaggggcacgggtatgctgattacgtagtagcgaagtaacttgcgataaccagatgttgcggtgaagacggctagccgacgtatgtaaactgagtgattctgaagtttaagtgatatggatttttttctctctctcttttgcctttatacgcacctcgtataaggtttgagacaggaaaatgacagaagagtgaaagtaagttggtcctttgaagtcttctttccacacagtacaccttgttgggcttttgttttgtttgcacctcagttggacagaggctgaggcgttgtacactactactaatacctcaccgcctagccgttagtcataaccgatccccgccttcgatgccccagccgccctcccaatgtccatattcacctacctcatcacatcacaacatcaacgccctgggacaatgctcctctactttattacacactctctattctttacctgtctagaaacaagcatgcctaggagtcctcgctttcttctttcgttgtttgttctttgatttcagtaatagaacgtattcgcacctcttgaacctatttgttatcattcaaagacaaattaggctctttcttacagtgctatcagcgctccatgcctgatattattgtctttatccacgaccggcgttatcgtgatcagaacagactgctgggcagtgctgcagcctattcgaccctatttatatattctgtgctgtcaattattatcattaacttcttcgtcttttctttttctctttttgaggatacatcatttctttccctcttccaagcttctcttcccaaggccacctatttttaaggcaaccaagtcgcaatgtcgaatctgtcgccgactcctccaacaccaaaaggccctcgtaacaaccggcgcaacccaaaacgaaatgcgacgccgactacacaaagggcaactctgttaacgactcctccctcgtcgcctccgaggaacatgagcccaggaggaacagccactgattcctctgccaacctatccaagaagaaaagtggccggtccaacaagaagccacgagatttatctaaggcttcaccgacgcaaagaaacggccaccgccgcacatattcacattctaacaatatcaccacgcctcagctaaaagatagccctcactatgctggcccgacgttccatgcctccccagctccctcctcccttccaattccgagctttttttcaaaatcggtaccagatcccgatcttgccccggcaatagaagcagatggcgataaatacgacgttgggccgggatatgaggcgacgccctcaaagctgaggccacgcgctcagttccaaaccgaagagccgcagtcaacacctttggatttcctttttaaagctgcggttgaagctagaaattctcagccacagtatagtcccgaggcaagcatcaagattcgctccccacaaacagactccaagaccctgccgcaacgcaaacccaatggctctacagaagggtcattgccgttgggggtagtctatccggtaccccataactcgcagatagggccctcatttgctacaccttacaaagatcgcatgaacgcattacgatccgccagttctccctcccactccgtggtagaacttgatgaggaccaacgaagagccaaaactgaggccctgaaggatttgttactcaatccgcgtcctcagaggccctcgtatgtgtcaaaatcctgtagtcaaactaacggtgtcaacgagcagcctacccccattggcaatgtgcctcattttgcgactgtactcaggacagcctctggcccgtcagcaactctttataacaacgtgctgccggggcagaatcagtcaacggttgggaacggttggcagtcaccattttccaattcatatactattaaccctcagccctctcagggtcaaccctcaacctccaacaaaggggctctttcatcaatcccagggaacacagcaaacgtctcaggagagaaatgctcttctccagtatacaatcagactaaattcgacatcaattccatgcagggtccaaatcatccgccagttcatcaatcacctacgtcacgagtttcaaacacgtccaccaaagctctcgacaccaagaaaatggaagacgatctgcggaggattctgaagcttgatgtgaatccaggcctgccgtccaacagtattcagagttcatttgcttaatgccacttcccttcttttgattttttcgttcacgctttctggcattctgcataacatttgtgcataacaatcgatgctccattttccaagtttcattcccatgccgaatgatatcttgtcttgaatcttgggtttccttcgtctagtctaatgtttccggtggcagtctctcatctatgaccaagattctcggcgttcttccggcggttcatgctggtagtgatcattgctgtaattgataggttgatgggttcattggtccttcagcgggacatctttatacccttcattgcatcgaacgcggagtccggttgcctttatcggtggtctttctcggagtgtgttggtttggaatattgtttggatgacagatcagggacccctgatgtcactcgtttagccgtcggtgccgactgttatctctctctctctttttcttttattttttattttatttttattttatttttattttctttctccctgatagctttcttgtcctcatttttctgatgccacacttgtctcttgtcatatttacaatgtctagtcaagggatgactttctcatggcttacgctttcttagtctattaaatcatttggttttctgtttcccctatcgggcgttcgagatctcagtctctatgtctatataacgtctttactctcgttctgcacacctatgcattcgttaccatacactatccgaactcctgattcttctcgctatttaaatcatcaaatgtcacgctttgtgctaaccctataacattaaaagttcagtggagacttcataaaggtgttgtagtcattgcaaacccacctacgatgtaggcttggagatggtcatacacgctgatacccaccagcaattgggtgtattagatatgtaccaggtagaaattatcgggatacaggggaggaacaggtgaaagcctagaagacttcgaatactggttcaacctcaaactgtacagagtagcgccggagactaggcaccactggccgtccccgctctgtacagcaaattacgaccttgaaactaagaaatccattaccttcgtggagacttgcttggacagggtcgcccacgtgtatcccacagtacaattaattcttggagttgaggattggtaacctgcgagaacaaagagccctgcctaccttgaatgacttacagtaggcgaaactgttgccacagtaaattcgtaggggtaagtattcctttcctcaaccggcattgtaaaagaattgtcgattggtattaactagaacgccaccacttcaggtacacctactccgtactggtactagatctccattgcactgtagatccaccgttggcttttcaagccgtaacttgcggcggttcctgtggatcgccgataggacgcataaaataccgtatgattataccaatgtgtgtgtactccttgcggagtaggttgtatactaaagatacataccatacatgataataggtggcacagacctagcaactcaatgtgtctgcattaagatagtacatctgactactttatatagtagtgttttaaactgtgggtttcttggtggggaatatagtaaacattccctgtatccataagtaatcacgaatggagctataaacctacagctgaggtcttcaagaggtaagtgaataatatattttcgtataacccgctgctgatagaagcaatcaaacaccttactattatagaaaataaatccagaaaatccaaaagatccaaaaaaaaatccaacacacacacacacacacagagagagagagagagagagagaacatacatgtgggagtaagtgaaaatgagaaagtcataccagattttgctaagtcaccctgacaatagccagcgacagcataccttgaaagtgagtacttcactcatatatagctgaatattgacaatgatggattggatttatcctgcctgttatacctgggcaaatcggaacagtttctgttagtgagaagaatgttgagagattgatgtactggaatgttatatagtacagtacagtgtatgttgaacaggacaacaacttgttaccgtaacagaatactatagtttttagcacatttgctgaccccagactcttactgaccaatgatgaaggaggcccccaaagccactgaaaagcagcaaagttgatatgtggtagaatctgctgcgtacatacagacagatataggttgtgtacagtaggcaccgagatcagtacagtgtacatattatacaatacaggtgtagcttagtatacatacagaggtataggcacgtattatacatacatacatacataaagttatatccgtcaggtacagagtacatactttggatactaatggtttcgatattataaattaccgcactaccgtatgttatgtctggaaacactccatccctggttccggacggttgcccaggggtcaaggaaatcgtggatgccatcgtctcgccaacccactaacaacgctaatcaagaagattttctccaaagaaaaaagaggaacaaaagaaggacgaataagtatcggaggacgaagcagaaacaactcaggtgaaacgaggaataccgctgtcaatagccctgattatctgtcttcaggacagttgagatcggtcattccccattatcgcaatctcatctctctctctccctttacctccaagcctcccttggataggatttctttccttttatcctctcttttttttcccttttctttctgtttcttcctttttttccccccctgtctatttcaattccaaaaaaccccttctcccagtctttgaaccagcacatatacgccatttcgaaccccctcaccatccttccgccttgttatctactcctacttccgaccctctactggaaacattcaacattttccctctttcctcctgctcccgtgccttgtctcttcctttacactctcgaccacgaacgccacagttattcaatgatcagtgtctggtactcgtaaattctcggagaggagcagagtcttgtttgagatcagtctgccctcattttgctcaagttttcatcatggcgaatccgtgagtatctctaccgactctccctcagagagaaagccctccccccccccgggagagtcgtgagtgaatgcccgcctctaactcggcaacagaattacttcggcatggcgttccttttggcatacaatgacttcttacgatcggcatgcatcccacgactctccttatcgaacaggtaaacatgtgcctctcagccagagtcgccatgagcctcttacatcaattgcaacaagtgccattgagtcgcgacctgacctgacggagacttacgaggatgaccagcccaaaggcggaacggcatctaacagctggactggctcccctactggtattggctcccctactcgtccttactcgcctggcatgcgatcgctctcctcccagaagcgacgctcgaccgatcccggggtagatggcgcagcagagattcaaatgcaaagtttccatgatggcgcacccccaccccccccagtcactcattcatggagaaagatcgagcgatggctagagaacaactacgaggagctttacgacaacctctgcgaaggctgtactcagaacgatatcaatgagctggagcatgacttggactgtagcctaccattggaggttcgggaatctttgatggctcatgacggacaggagcgtccgggcttgcccaccggcgtggtttttggatgtatgcttctggactgcgaagagatagtccaggaatggaagaactggcgcactgttaatgaagaattcctcagttcatccggtattatcaatacttctcccaaagctgcggcaggctcttcttcggctgcacccccagctcctactacagggtcaaatccgttgtggagacaggatcttctcgagcgacaagactctcagccctccggcgcagttcagaaagcgtatgcccatcctgcttggattcccatggctcgtgattggggtggaaattgtatcgcaattgatctggcaccgggacctgcagggaaatggggccaagtcattatattcggtcgggattatgactgcaaatacgtcgtcgcccggtcttgggcatcattcctcgcagttatggccgatgacctctgcagcggcaaggtttccgtggatgaagagacgaatgaactcaaactattggaattcaaggctcagaatgttgaacctccttacatggaaattctacgctggcgtacagatcagaagtatggtcggaggccaccccgtcgcaaaggtcctaacggtcttggattgaataccggtagtaagtctggaaaggagtccccttatgggagcccaacccctagtgaagagcgtgggagatcgcctcaccgctttcccaatcgtgggtctactcaaagtcccaagacgcagtttggtatatccagccctcttgctcgcgtcacggaagaggctccaagtcctgtacacacgaatgcggatggcggcctgccagagaacgtcgtgaaaagtgacgatacaaaggaaacacaaagcaacgatttgatggaagtgtcgacacatgtgggtaaagagaaagaaggtgttcttgacaaaggtgcagagcaaagaccgctggagacggagatgatgaagatgcaggagtcgacccatgggtctcctggcactgccttggacgccgagaccttgggcgaaatgaaaaacgtggccatctaattctgattagatatcttccattcacctctttttcatgctgcctttcgtccccatcatgaatatcttgtttttgtcgctcggataagttataaattctctttcgtcttgactgccaaacaccgatgtcaaactgatgaacctttgtggagaccgtgctgacagccttgtataaatccaaactttaatatcctgtggttcttgtgacattcttctacgttatagaagcgtcttactcttttcctcgcttgggatggtttctcgcgatttgttccactcgcacgtactacctgtaactctagctcgaaattcgttaagtatcattttagcttttctttttctttctttctttctttctttctttctttctttctttctttttttgcgccatacttttcatgatatagacacgagggatccgataaattgtacttgcactattagtagggccatggccctgtcttccaacacccttgggaaaacggcgttagttcacaacaggtgcagctctatctggtatcagcacagcaaatgaaattgctatgaaaaccgttcattcccctgctcgccagtacgcaagctcatgcctatgcaactactgtattatatccgttccattcggaatgcgggttccaatgcttagtggaaggctgtctaagtggtcaagggctggtagaacctgaaacctacagcaccttatttcaatttcaggaggacagccatttgtaaactgtacgtccagcagtcagccacaacgaagctatgtgtttcaacaagcagatcccgggccaatatgctctagactggaagctccgcgaagatcgtggcaatagaactcgtgaatataagggttaaaaaggtagtaacccctttttcaatcccaatcgtcatcgtgatcatccctgttgtaccgtgctcccccgccgcggatggcccctcccccatgaattcgtcgtctgccatcgtcctcatcctcgtcatctgcatcagacatatcggaatcatcattaccatctttaatctttgcctgcactagaactcctttccataatagcctcttttcaagagttgccgtgctgaagctgtcggtcccatcacgcccgcccaaagcaagaccttcaaagccaaccacacgctcagcagcaatcccatctttaaacccgatcacgcaagggagaacgcgtatcttcagcttttccaccacgaacggaatgtccctaacatcgacacgggcaaagcgcacatcgtaatgccgtgttgctaaagcccgcatatgttcatccatggtgccacagcgtgagaaatcagggtgtgcaaaatggatcacgcaccgatgggtatccgttgtgaaactgagcaatatttggtcattttcaagagttggatatatgctatcttgggtgattgtggtctggccaggggccactgaccggttgttttgggcggatgctagctcggcgttgagttgttcgatacgttgggctcgatatgcagagtcgtcttcgttctccaaggccttcaacaaatcgtcgtcgtccgtcccatcatcttggtctcttagggagtgtttgggctcaatatttcggatcatgaccaaactcgtcgtggaattgcaggaagaagttttctgcacgacaacagcaaagatatcaataaagtaagttaagtctgtagagaacaattaatattcatggaggggttgcgtgggctgctcaggttccagggtaaggttgtaaactcaatgtcagggtgaaagtattgaccataggtgttcaaggttcgaaaagggcgaatcagtatttcactattcactgcattgcaggagtggcaacgtgctaattggatacaaatcagtgtaaagatgaaatctcgcgaggttcagttgtaattcttttgtactggtattgagttatactgatacagtatcagctttccttgtattttaagtaaactcaagagaatggctaatgcacccttcttcacttttgttcaattaactgttctcctttcccttctttcaaataataagagatcttagaaaagaaaacacatcagtctgtgctacctgcatagcctggtagatatgtgtgcattagttccatatttccttcttccgttgtattatcatgtatagatacatacgatacatctaaaattgccgcttccggcccagtcaaaagtccttccttccttcctttatttctttcacttgtctcctctacttcgtcttgctctctcttcccccttccctctgtcgacctgcttctctgttatctctttcatgatttgggtttgattctactgtccccacactcgttgtcatcagtctctcggtacacttaatcttagctataattctcgaagcctacctttgcctcactactccccgtgtcaacaacggctctacttcgcagtttcagccatacctcgaagtgattaccgctcttgtcgttccgtttcactgctatcattatattcactcctgcttcggggtgatcagtatatttgagaatatggtggaaagcaagaagaccgatgattatgcaatcgagatggataaaatagatcaggggagcaagaatttcgaagctgctgcgccgcctcagcctagaagtgtcccatccagttcgctctccggcaaccctgtcctgcctgtattggcgtattgtggatcatcaatcttgatgactgtcatgaacaaatatgttctttcagggttggactttaatctcaacttctttctcctttgtgttcaggtatgataccaagaaaccgaagccactgcgactgtaaaatacagatttgcactgaccgccctctttattcgtaactcagtccattgtttgtattattgcgatccaaacatgcaaattttgcggcctgatcacgtaccgtgacttcagtgcagatgaagcaaagaagtgtaagtacttcaaatgccattgtgacagttatagaacaaactaactgtggtatgtaataagggttccctatcagtttgcttcttattggaatgatctacacgggctctaaagcgcttcagttcctctctattccagtatacaccatcttcaagaaccttaccatcatccttattgcctacggggaggtcctctggtttggtggttccgttaccggccttaccttgttctcctttggactcatggtactcagttctatcattgccgcatgggccgacattaagcatgctgttgaaagcagtggagatacgagtgcccaagtctcaacgctcaatgctggatacatatggatgttgataaactgtctctgcacatcgtcctatgtcctaggaatgcgcaaaagaatcaagttgaccaatttcaaggactttgatagtatgtgtttattcgcggtggtcattggaagtttttctttgctgactttccccttagccatgttctataataatttgttgtcgatccctgtccttgttgttctcacaggtttgatggaagactggtcgtccgccaatatcgaccgcaacttccctcaggctgaccgtagcagcatcatgtttgcaatgattctgtctggtttgtcttcggtgtttatctcatacacttcagcctggtgtgtccgcgtgacatcatcaaccacttattccatggttggagccctcaacaaattgcccatcgctctgtcgggactgatcttctttgatgctccggtaacatttcccagtgtttccgctattgctgtgggcttcgtcagtggaatcgtatatgcgatcgccaagattaagcaaaacgccaaaccaaagaccggcgtcttaccgacttccaatccacttgtcagtgctagcagtcagagtatgagggattctctgcggtcttgaagtgacaactgctatattacgcgtaggagtgttaactccttcgtatgttagtaatatcggatcatgttcttggttcgttgacggcaaagagtcagtacgttacttgtatgttaaaagcgatacgtgtattccggtcgtccatgttgtttgctggcttggtgtgcttacattcttatcgacgatcgacttaaaatgcctcgtttctaacacttctgaccttattgctgtttattcacctatttatagttttgatgtccgtgctgataatctcatatatcagttctttttgatgggctggcaacgcccttcgttgcacgtaacatgtcataatgttgggctgtgatctgtcctatatctctgggatggaggcattgattgcgatattgggtgcaataagatgtctaggaggcttggtcattgtgtgagaggaaaaactttttttttgcctcctttcggggattaaatttgtatatatgaatctttatcttctattaatgaggttatagaaagaattctttgctgaaagctctttccaacgactagctcgtgctattgactgactgtggcgcggtaatggggtgctcttccggaagatctgggaggatcatagcatatcatgattttccgtgttcctctttctgggctcgtatgtcctcaacgggcgggatgtgtagtccggtcgaatatgtgttaggtatggatggcctggcattgtgaacatgcaactctgacccggtgctctgtgaaagctatgtatccacgaattgccataggaggagcctagatagtaccatgggaaattttgatgcttgcatagtgtcttaaaatgccaggtgaagttatgtgaagtattttcttagaggcaagagacgaggttgtttatcagttcaattatttttatcttcccaacttcatttatttcccttccttttttccttcaaatctttcttgtagccctcctacctatccaccctctagatcacaagcttaaaacggacaccagagttgaatgatgactttctggaaattatctacttaacatatctcccaaggaagcagaagcagttccatatgagttgttttcactgcatgtagatctccttttactcagaacccttttatcctggctcaaggattatgatttgttgtaatacctaaccatctttggcttttatgagccctattactccgtacactatcatgaatacgaatatccgccaactagaaaaatacatttacatccagacaaaagacttataattttataaataaaagctcaaatctgttctattcctcgatggtctaacggtcatgatttccgcttgtcatctcaaagagaacaagcgcgggagacctgggttcgactcccagtcggggagagtctcctttcctttttttttttttctcctccttccagtctgaactttttcaaactctcttcttgacctgtcgtcaactgcctagtacctcagaaaagtgttggatcagtattgaccggaagggacgggcccgcgctttctctttagaatcttcataaaatcgaagatctcaggccatctaggactttggtcccctttctattcatgcaacacaaccagttgactactatctatccctgcccacgttaagtttacggacactatacggcatgccgaaatcgaagagagcacgattgcatactggccatggaggtggcaaccaaaaaaaacctcgtaaaatgcacactttctccaagctctcgagtactatttcttctgcgtcttcttcacccaaacagaatgtcggtaagaagaaccctttgcatcagcggccgattattccttttggcagaaatgaccgaattctgttagttggagaaggtatggtgcttcccctcctggatttccttgggatatgtcatcatttcgtacaaacaagtagtgtttatacatccatgattaatgatttgcgtaggtgacttctctttcacccgctctttagttgaccaacattgctgcaagaacgtcttggctacatgctacgattcaagagaagtattatacagcaagtatccccaggccgaacctaacgtttgcgaaatcctcaatggcgcccccaagaggaaagatcatagtccggattcaagtatcactactgaactaaagagccaaaaccaaagtcaaaatcagaatcaggaatgctatcgcggcgatgatcatgagggacacagggaaggagaaaagaaaggattatatgaagacaaaccaaggcaacgtcgccggcccaacgtccttttttcagtcgacgctcgaaaacttggccaggcctctggaggagggaaagacgtacgcttcggactccctcgccgggaacgtaaacgccctgcatggcaagaggccaagaagagtagcggcacttcaatcctcccctcaaccagaggtgggccatgggacattatttgcttcaatttcccccatgttggcggcttgtctaccaatgtaaatcggcaagttcgtgccaaccaagaactcttggtttcctttttcaaagcttgcgtgccactgctgtcttctcgtcccgaaatgaataactatgtaaatgaggatgggtgggactttagcaccgaaagcgaatttgacttcaatgaggaggataacgctgatatgctgggctcgcgaaatgacatggcacaacagagcagacgacaccgaaacgaacctgggcagatcatagtcacactattcgaaggagagccctacaccctctggaacattaaggaccttgcgcgccatgctggtctaagggttgttactagctttaggtttccgtgggcatcctatagaggatactctcatgctcggaccttgggcgaaattgaagcgaaaaacggaggaaggggtggttggagaggggaagatagggaggctagaatgtacgtatttgagccgaaggaagagcgcatactgcctacgatggattttcaatcctcaaagagagataaaacttcgaggaataagagatcaagagcatctagtgaagatagtgactgaaaggccagagaaactgaaatttcttattccgtgcagtctgcagttcatcctgaagagcgaatgaaagaaaaggacgagtatcgggtccatggctacatgatgtaaaccttttttagttcattttcctcaaatacttctccagttgtagggtccttgactttgccgacttcaacgcaaccaactttcttactcatttctagcaagcgctgttggccataaattcgaccatttggtagaacaatcggatcgctctcaacataacttttggtatgatgggcgtagggcatgttgcgcgcaagctcatgtaactcagttgagcatatgggacagactgacgtcgtagtggacagagaattagagcttgaagacgtataagccgaatggcaagatggtgtcttgagagctgaaagcccggcagacaaagcaatgtggagtaaggggcgcgacggcaatgacaggagttcatggtgagtgcgaacaaaaaggtcagaaaggtaactccaccggtcaggcgcatacatcgactgctcatacgttattaaaataaatgaagaaactgatctaggtagatatgaaatagtaccttatatggctcggccatcgtgtcccgggggaaagctaaaaggcctgccgcccgatgaatttctgttgactgcgaatcgatgtaagggctaaggaatctttttgcgtgtatcatagcttcaacaagcttccctttgtccccagtcctcaccatttcgatatattgctgtaaacgtagttcgaactctaagttgtgctgcaattgaatgttagtcattcggtttgcaatccatacgaacctggacacaaacctggctcttctttagcgctgctttgttttcactgcaccattgcaaagcatccttagattctccacgacgcaagctttcagcaacccgctgacactggatgaaaacattgagatctgcgagatcctcgatatccttctcatgggccaattgccgggcgctttccgtatatcccgatcgcagcatatagtctgtcacaagtctatctaatcggaccctcgaccactgatcatacttgacatctgccaaactatgtatctggtgaaggttttccaggtgctctatacgctttcttgactggtcatggatctttctctcttcctgatgcaagttctccattttccgcttcaagccttgcatcctagatatcatagcatctaaagcagcgagagtttgatccggtgtttgaccattgcacggcgagatactggcagttgccttcaatgagggaagaatatactctctttcccgttcaacaatccgctgaactgatttgaaattctttcgcgcaagttcatgaggtagacgtaggaggggttggtcctacgagggagaaggaaatcaatataatttgaacctgaacctgatgatcttgggtaggcattaccaacagcaaatgattctctgcgtttagctttgttgacgtaagctccgcagccatgattattgtaaattccttaagtatacggtctctcaccgacacaggggaatgggagaaaaggagtataaggtcatatatcaatcagcagtacgattggtatgtaccgtggacctgggtaagaggggaatggaagtggcacgtacataggagacccggcaccaagtcacgatactttaggctgagcaacttagccaatcagcgtttagacatccttcataccaacaagacctacgagagtagcattctctcatgatgccattctcctgttgttgttgttgttgttggttttttttttttttttttttttttttttttggaagaaagcagaaaaaaaaaggtataccttggaacgcttttcctcactgactgaaacgattactcaacagcatataactataaaacaaaacaattgatattgatttcccttttcaacccaagactccaataaaaaagaaaaacacgtatgatacaggaattatgcccagaagatgctccgatagcgatttagagacaagggatgttagactcccccatacaggaaggcttcgccaccggaagcaaccaagggacttcctgagaagccttaatcgctgtcatcactgtcctccttctcttgcttggactttcgtcgctctttcttttccttcttctccttcttcttgcgcttgcgttcagctcgctcctcgggagtctctccctcatgtcgcttacgtttctttttttcatcctccttggactcatcaactcccatctcattttggggtgacgagggagcttcgtccagctcaggtgtaggaacagcaacttcgctcttaggcgttggctcaactgccaattgctcagaggcttcctctggcgcgctataatccttataatcattcttccacttggcaggcgtcgcttcattggctcgaccatacttctgcatcaaactgtcagtggcaactcaaaacacaaagcaaaatgaagggacagaaaggaataagcgtacatctagttttccggccgacttaagcttcttcttctccagagcgacggggccgagaccccatctccgcggataaagatcgcgttccatgatacaacgcttaaccttggcaacaactccgtggtcgcaagtagataactccactgtcgacatctgagcaatggcaatggcaatggcctcacccttggtagtcatgagcacaacttcttcgttgacatcaattccagcctctatttcacattaatcatctatatcctgggaagtcatatggcaccatatgaacatggtaagagaggtgaaacataccgaatctcagaagaccggggatcatgagtttggcaccgtaacaaacggcattcacagcactgtccttaacgacaatacgcttgtaagatgtgagtagggtctcaagaggtttgatgactttacgcaaatacgactcatcccgctggttgtcatacatccactgagcgtcaagcacatcgtgcaaagtcaccagaccactgttctcatccatagccccacttcttacacgcctgagctcttgcatatgcgctccaacaccgagcaagaggcccaaatgaacacaaagagttcggatgtatgttcctgcctcgcagctgacccagaagacaccgagatgtcgatcattgtcgaattcgtaaagcttactctcgtgtatcgtccggatacggagctgacgcttgacagcagagatcaatggcggtctctggaaaagtgcaccggtcaacgtctcaagggctcgtctgaactgagcctcaccacccgggatcttgtcgtggaggcggatcacgcagacgtattcctttccagcaccctgctgcgatttaaccagacgagtggcacggtcgatacaaacaattaaacaaccggtgacctttgggtccagagtaccgctatgtccagttttttctgccctgatgaagaataaaaacaagggatttagcaacctgttatttgacttgatctttgtggtattacctcaaaatcctcttcatccaagcaaccacttcatgactggatgggttagaaggcttgtcgaggttgatcactccagagttgatgtacgacttcaagtcacgtttcagaggagaacaaccggcgggaattggcgtgaaatgaccagtcctgacgaggactgtaaaaggtgcaatcagttaaagctactcactagagcaatatatgaactcatcgaagccagaataccaatgagctctgcgagaatacaggtaaaatgcgaacgtacgcttgtcataattcttcagtaaaagcggccagtcagatgtggaaatgttggaggcgccagactctggcttgattgtgtagtccatctcttccttagccaatgcgaccgccattttgaacaggcttgctccgagtgtgcagagtagccagggaagagagcgcgcaggttagaaaagaatgcaggaaaaattgcacctgccgagctaaagttttgggggcgctagcgagaaagcagtaatgggaaattttgaagtgcggcgaccggtctaacaacaaaacaggctagcgcaaaatcccttaccaattgaatagacatcccgtgacttgaatagcaaccgatccacaactacgaaaaaactctgaaatccttgttgcaatcgacgttcgctgcagattaaggtacttgttcaattacattgtccccaaaggtcaaaactatgtacctcatacctcagtgtctagactaccattatcaaatcatagtacaactaaggcggttgttttagccgccgcccagtcttctgccaggtcctctactactccaagggctttgaaaagaaccccggccctgggatggattttgctcttcagtaatcggacgataagctgttccataggcccggtgctgagagggggacgtatgggcgctaaagattctccgcacaacagtcggcgtgacaatgtagttcctaccgcctccgaacgtcggatatatgcgtgagaagaaatcatacatgtgtgccgcgactattcccatactctcactgaatgctgcatgccacccgccaagcacaagtgtccaggtgagcatcgcccatggtaggaattcaacaggcagttggaccacaaaaaaggaggtttttctacctttgttgtcctgggcaaacgtgtagacaaatgccatgattaatgctaccgagggttagtatgtgaaattatgctggatgctgcagcgatctcaccatgggtgaaaattacatcatctaacaggcaacctgcggtgagctttaacttgtcagcacaggtgaaaggctacttgcgaagcaaacagatataagcatgtttgttttgctaagacataaaataggaatcttatatgtagggcaccataaccacctacgtgaacagaatttaatcacgtaggctatctcaaaggccgtcccaccatacctacatcgcatgcagccctaaatgataatgcgaatgcggtactgtatgagatgcaggggcaatcttcctcacttccaggaaccgcttcagctagatgaaggctgggcgggcagatatgcgaggttattaaggcagaagttggtaccaaaaaaacgggaggggggaagggttgccaaggcactgataaacaaagctgtcccattacttaccgtaataacagtagctacaaagaacacgtacgtgaagaagtcacctggtaagctgaaccgtggtgatgccgtctccaaagcactgccatacttgaacactactgtatgttagtgccgcggtgagactaggctatcgcggattctcactgaagtagagatcaagtatgaagtcgaggcgcggccctgtcagaaggaatgacgacaataacctccacgcctcaggaagcagcttgaaaactagtcccggtcgaaatataacatatctaccacttagtaggccaccataaaccaaggcggactgaacgaaagtaagggcagttagagtcctagtattacaagggtcaatcatttgattatgggaatggcagcttgataatgatatgggatgagtaccttgtcacagggggcgcagaccaaaaacgatccattgaatctaggtgagtatagggaatcgaatgtttaagatggatcagagattcaagttagaaacaggacacgttgcaaacatcatgcagtgcctgactttgatcaccttggttgttcgaaagtaaaggaagggaggaggagaaatatgttgtgggagaagaaatataaaagatgtctatccactagtggaattcctgcggcagtacttttttccggcataaacccgacctttttaattttctctacggagtactccgtactctgtacagagtacgacaatactatcgtactttacacgagcttgtatgtatttagcatgtctcccagaatcgggctttcacttggccttaatacccgcctgccttcctaccatgattgtttttcaccttagataaaagattttctttttctgcagttaaaaactagattattagatatttagatgttgtcaatagatttgtatatgatacctaatttattgacacattttctttactaaaatacccagccgtgtatggaaagtcctcgccaggtccgcggtggaccgtccggtcagggatgacagaccaatagcattatgcactcttaagtcttcaagctctagtattggttggaggtcacgtggtattaaaccccacctggcggcaactttccgtgcacgccctccgtagagctatataaaatatagtaatgtatagtactatgtagctagtattattgatgcggtggcttaatccactagtacgcacgcatatagccgggtgacggacatactttacgtacaaggtagcatgatcacaataccagataaagggataatacttaaataaagtaacctctgttcttaaatccaaatcgcagagtagacgtctttggaaccttgtctcaccgtgaactaaatctactgtatgaaatctcgcattaatgatgattagatgactagatgaacagtttgacgatgaatgaatggtttaggctgcatagttgtggaagagatcaaggttgtagtatgacggccgaagttctataccagcgctttgctcattctcgcggttttacatcagctggaaacatgaatatagagtgccttacccaagtggtgaactagcatgtgccgaaaaactttatatcgggacggtgctcgtggtgatctaaagacgcgaagcccattccttacactgggcttgtaaaagcagtaccgcgtactgccaggcctccattctttccttcaatccatacatcccatacattttcctttccagacttcggcttgccacaaatggttagaggttcatcgacataaagaggagccacatttcgatagtcaaattccctgatggtgtgatcagacctggcgagatgtgcttcaaggacagtgagcattagtgtcagagtcaacggtccatgcacaaggaggttccggaaaccttctacattctgagtataagcctcgtccaggtgaatggaatgagcattgaatgtaagagcagagaagcgaaacagtaatgatcttgtcggcttgattttaaggcgatattcggggctaggaggtgcttgaaataaacaaaaaaaatgtgtcagcatgtacttttggagcgcgttggatgaacttgcgcacgttttataactctctgacagttatcaaaatccattctgtcaaagttcaattcatcttgtgttttcttccgcataaaagccagattcctattttcaatgatcgtagcatgcccattttcgtcttcggtctccttccatatccgctctctgatactgccttcctcctccccctcccgtaccacgcccattcgcctctctattttaactattactttctctgccccttgacgtcctttgactattacgtcacgaattgtttcgatacagacagctcgagcgccgttgagaatcagaccacctgtgacaggaaatctcacacttccaccggcccatagacgcctctcaaaaggtccaccggggctatgtaagatatcagtaccgtctggtagcaactgtgatagcgtaacctgcggaggaaaataagccaggtgatggccggctggcatacgagatgcatgggtgactgaggggagagccgtatgaatacgtgacgatataagatcccccggaagaagatcagctaatgtcaagctcagaagatgggaaggctgggtatgcaaataatcaaagtgcaaagggagtatccgtgatgttaattcgcgatgcaagcgatcgcaaagtgacgagtatgtccgcaacgcgattgccgatcttcttccccccaatgcgagtaaaacgttcctcttcatttaaactatcaggcttgtatagcaggggcttcttctgagtttagcagcgatggaaatagggatggcatggaaccgtcacagtgtgattgaagaagctcgctaactaaacctcaataaccaagattgcgtatgttgtttgacttgtttgtttcaaatagtatccccacatacaccatacactcggaggtgtctagtaaagcaagtacagcggaatttcttctctgtctttagtccatttcaacagctatggagcatatcactgtaacattcctgggccctgctgcatctttttcacatcaggtcaggacactaagcccagaaaaatcgcagatcattaatccaaattctaggctgctgttgagttctttgggaagtctgctgaattgttaccttgtgtatcatttacggacgctttcaccgcagtgcaacagggtgaagcagattatgctatcattccttgcgaaaactcaactaacggcccagtcgttcaaactctcgacctcctggcagaccccaacggtttttacgaggacgtcgaggtatgcggcgtgcattatttgacagtgcaccattgcctcttggcccgaagaggtgtattttccagtcaacaggattatggttctgtggctaagctttatacgcacccgcaagcctggggccaatgtgaaagatttcttgggaaatactttagaagcattgaaaggcaggatgtctcatcaacttccaaggctggggagattgtttcaaaagcaaaaacagaacaaagcgctgcaatagctagccgctttgctgctgagctccacggtctggatgttttagaagagaatatcgaagacaaaaccgataatacaacgcgcttcttggtgctgaggaacaaaaactcgggccgcacagcgccgcgccctttcggagacttggataaccgccgcgtgcaaggagcatctgcggcaaccgcaaggaagacattgatatcattcatggttcgtcaatatgcccctggggcattggcggaagctctattaatattcaagcgtcatggcatgaatcttacaagcatcaactcccggccaagtcagaagaagaattggcagtatgtcttcttggttgagtgccagacagccgataatccgggggacaaaggcgtgggaattgagattctaagtcatttgcagagtgttaccgagacttgtagacatttgggaacatggtctgaatgatcatgaatgatgtgcatttagttgataatagcaaatgcaaacttgcgaactcgtgggtaaaggccagagaatagtaactgttcagaataaatttaagtgaatgtacagtaccgaatatatacgcaaatacagcaaaccaatctaaaaagacagatgagagtcccctcctctctctccctgttttgctttttcttcctttctttatcattttttttttctcgggcaatgatgtataaagagcgcatgtaggaacaatgaacgaaattggacagtaacaccaacaaggcataattttctggaataaatcaatcctaactcgctggctcaaatgccacagggctgacaatttcttgtgggtagctgcatcgtatcacatccaccatccctttgcaaagtacaccttgtgtccacctagaccctataggtaacataaatctgaatagtacggagcttggatgaccctatcaggcagcatagctgttaggaattaccggaaaacattgctggcagatgggcgcgagcatacctttgagcagctggacggagttcggtccaggcagcatgatggtccctactaatgaagcgatgtgttcaccatgaaggctgccttcatgccacaaagggcgagccgtcaaaagacccattttggggacttctggcctttcatcctcgctccctgcgaggtcgctggaccgtcaatctgtagtatttcagcgtcgatatgctagtcattcagcgtggacaataggcttaccatcataaaattcgtcctcgtcttcaaagtcggcaagctgttcgaaattgaccttataccggagaatagccccaataccaccaaagcccttaacaaactgattaccctcactagatttgtcagaaacgaactccaaagttgcaccgaagtctttatagctttctgcaagccactcaaggaacgaagactgatctacaacttccatttcagtgccagtttccttctcgacgaacaagtcccggttctcctcttgggctttggttgtgtgaatgacaacttcggaaccggtcgagtttttcaagacccatcgagtgacatccaagttctcgtatacaataagtgtctccgctgcgccaagttccaacgccttgagagtatcatcaataccgtagcagaccttcccagtgtcttggctaatttcctcgaaatacttgccaatgagcttcttctcctgcacaaacttaacattactcaaagtttccgaggcaagttcgatggcctgattgaaaccgttctctcctccgtaagatacatccacaactttgatcaccttagactgcaaccgttgatcgaacatatctgattggttgaggtcgttcttgaagtcagctgaaccagctaagatcagacccgcaacgttaatcttgtcattggttatgtagttttgaacggccagctcagcaattttgcgtacatagttatggcgcttctcttcacgaagacgcgcgaaacgcagtgctgactgaccaccacggccgtgtttcttgggcaagtcgacgctcaacttctgaagaacctctctggtgtttccactaagcgtgccgaaaagtgcaccgtttccatccataacgataaaaccgaacttttggtccgagtcaagaagttcgctcagtgcttcagtgtggaatttgttatcacacaggtaaagtgacgtattgataggcttgaatggctcgaagtcgatgtttattttacgctcctttccctcagaggtgataatctcaccacagtagacgaccaggccatttgggggaaccttattatatagcttaagacgctgctgcgtggaagtgatggcggacaggacagaaagacgattgacccgggatttgatattggaagccgtgccctacatatctcggttagcctctcccttccaaaaatggactcgcccaaaaaccttacaaattcttcagccagcatctttgccgccctagatacctggtccttgggagctgaaatgcatagtgttagctgcaatatacaatgatgaggtcgtggaagaacccacggatgataagagatatcatcgaagtgccatttcctctggcggcctccagacgcttgattagttttttaaccttccatatttcgatattcttctccgcttcattcgcctgggccgcgctcatgttgggcgacacgacgatgttggacgaccggtgggggtaaaaagccttaacgtgtgtacttgaccgacagtgtcaactcgtgaactctgttaaagataatggtagaagaataaaaaagggttggaatgaggtgcgacgtatttaagatagggagggagaacaaacaatcaatagagccaggacttgagagagacaatttgcataccttgaggctagttcaatgtgccgtccaaatgcagcagcgggggtgttttcagcaaatttcatcaggcaccgtggggtggcagtgaccataagaatactattaggtcggtagtagttgctgatataatcatacatgcatgtctgtattgtaatattgttatataaagtattgcatatgatactccgtatagtacatacctgtatacatacatacatatacctacccagcctttactaggtgtgtaatagtagatactgctgagctttacaggtaaatggctgacaataaactatgtatatgtaactattacattagatattacactcagccccttgaagtactaaataagaatccatagattcccactaccaggcacaggtactttcatatatttatatggtttgaaatacttatacacgctatgaggtatctccaggagtataactggatatccatgtatataccagatattgtatgcaggactggtatgcttacaatacccgtattcattgaataatttgaactacagtcacacgagtacagaacatttgctacagttttagtggtaactgaatcgatggctgttgtagtactgctaataagatacttttacttgggtaaagtactagtagatgagacgtacaggtgagtaccaagttcacttttcaatcaagtgtataagcactatcactagacttaggggcactcgtcccaatccgttatttttctgtttgcttcttagtgtatctcttcagcctcccgttatcatcactcgtagtcgccttgttgtaatatatctcaagatacctattagctaactgggtatctatcttatcatttgtctgctcagttaagtcttatcgtactttcatccaattttgtttccggagacctctggaacgccgcatttcctgttactttctgtttttggattcctctttcacaacaccaccagcgccctcacatctacttctccctcttcctctcccgagtaaaaattaaagatgccggcttcaatagcgctaattgaggacgaggatataggagactctagtacgctcgagcgtaacacacatggtatcaggataccaagttcaaatccgccagatctaccaccagatctcgatgtattttctcgtgggaattccgcagggcccacgggatatttgatcgatgcttattctgtcaacagactaaggtgagttgtcaaattatgtgctgtcccagctgcaaatatttaaatcattcaggccagcatcattttccgcgcggttcagacaagcaggcggggtcaacagtattgatagttttgctcgatcatggcaacgagctgcagggttccccgaaataatccctcgccgtccctcatttgtgacagtggaacccgacgaagattgtatcgtgaatgacaccgctgagtcccgagaccgtcgatcgctcggcggagatactgatattactcggccattgcttgctgccgacactgaagaagagggttgtgacctcgatggccgaagtccgccgaaaggaatcgctagcattttcggatcctcgttggatagaagcaccggaacgtcgtacggtaccatatcctctcgcgttagcgaagcgacccggagacacgctgtacaactacacagggagcaacaagcccgccttgatgcacctgcgattgaggatactgaatctctactcgtcaaacaggtacaccatgaagatggtactcgtgagagtattgttgttggccagtcgaccgtgccgcaaacgatcttcaactccgtgaatgttctaatcggcattggactcttgagcctcccgctggcaatgaagcaggcaggctggcttcttggtctaacatttctttccttcgctgccgtggtaacttcttacacagcaaggatccttgctaggtgcttggatgttgatcggagtcttgttacctacgctgacttggcctacataagctttggaaaccatgcacgcttagtgacaagtcttctattctgtttggaactcataggggcttgtgtcgccctagtcgtactttttgctgacagcctccaggctctaattccaggactgagtagtcttcagtggaaacttatctgtggttttatgctcattcctttgaactttgtgcctttacgacttcttagtgtgaccagtatcttgggtataatctcttgcacatccagtatgcctttgtcttttcctcccgagcatttttcgtcacaaactaacacttagaagttgtcatgttaatatgccttgatgggctcctcaaaccaaacggtctgggctccctgcacgaaccagccacaacttctttattcccaaacaactggcggaccgtgcctcttagcttcgggttgataatgtgtaagtcctttgcaatggtgatcaaaggtgaagatgagttgactctatcaaatccgtaaagcaccttggggcggccatggcgtgtttcccaatatatatcgagatatgaggcatccaagtaaatatggaaagagcctgtgggctacatatctctttacggtacggggtgaaagggaaaagaaataaagcaacagtatatatctaacatattatgcacaacagtattccctggattgcgcaatggctattgtgggatgggtgatgtttggtgaagaagtacgggatgaaatcaccgccaacatcctgctgacgaatgaatacccacgcggaatatctatttgcattataatctttatcgcaatcatcccgatcacaaaagtgcccctgaagtaagcctatcccctctttctatagaccttttcaagctcatattccttgattaacacagctgtcgacctctcgtggctacggttgaagtcctttgtgggcttgggccacacgttggcttagcaccagaaaatcccaaaagcacacaggcaaccattcgacagtcattgcaagccattatacgacttcttgtggtcgcggttatcgtgttaatggcaattctctgcccatcctttgaccgaatcatggcgctgatgggctctgccttgtgctttacgatctgcatcattctgccacttgcgttttatttgaaaatattcggacaagaaatcagtcggaaagagtggttcctggactggcttcttttactcatatcaacagtattggcaattgttggaacggcgtgggcgttcttgccggagaatatgatttctgtatagtagagccttccagtcagccttgcggtcattgcgtatctctccttcattgtttgacaacaatagcgaaattgttcttcatcttgccagtcctcaaaacctctttcttgaacgacgtgggttggaagtcatggctgtgctcccaaagctggaatatcaacctcgaagtctccttgctcttttccagaacaaaccccatgctagacattatgtcccgtagtctgcactccgtaaggtatcgcgagtttttgacacaggccacaggtaagactaggaacagcctaggtgagatatggaagggtgacccagacaggggtgactttctcaggaaggcaacgcatcgcttcaacatttcgcccctgccaatggcatctgggacataattgagaaccagggaaaggctaatgatgtgaaactgatcggcagcgccacgagggagtgacatttccatgaaatcctgtcttaatattccgggctcctgagaattcaaatcgatcctggtgacatccagaaagttgttcatagagcaagcgtttttggtgctgagagcaccaacttcgagcacccgcagcttagacttcgtatcttgtaatcgcgataattgtggacttagccaatcgactaaaactttacttgagtctccaccgcgttctagagactgtccgagtctgctagcaagttgatatccttctaaaccgccattctctcgaatccgggcatcgatcctttcaactagaagatcatcgttggcttttagagcctgtgcccgatttttgagaagtcgatgatgtccgcgaatgagattgcgtgtggctttagatgagagggttgcatgtttggctctgactgttggcggtcgagtatgtgaaaggagcgtggcctttttcgtccgagatctcctcgaggccatgcttactatatatgtacttttctgtccctttttttttaaaaaaaaaaaaaaataaataaataaaaataaaaataaataaaaataaaaataaaaaggagtgaaaaaaagaacaaggtgtgcgatgttagtcttatagctgaactttggagaagatgcagacctaatcctcaagatccttcatcaagtaggcgatagggttggaagttgcctaccacgaagtgccttgtaaacaagtatggttttcggacggaagtgaaagaggagcagtaggtacagtacacgctacctacaaaaggagtatgcagagtccagacataaaacaacctttcccaacgactagaattaccattcgatggtcacggagttattgtgtctcaaaagtggagtccatgtatctatattaggtttggcgtagaatacaacagtgggactaagaatcaggtcaggtgacccacagagcaaagccgtagggttttcgctaagcgagtgcattcgaaatacttcgacattcgacaccgcgacaatcatcacgacagcgccggacgacagccatggcacctaaggcggataacaagcaaggtgggtagattttgagcgatttgatgttccccccagagttgcaggactgtcgagcttgaaagcgcaagtttcagagagcatcttgtgcttttctgcatggcagacactgatatgtgattgttccgcacgagggaactgaagtcaagagagggagtgcgtcgtggattttgttccctgttcttctcacctcaaactactctgctatctcaaatatcggttcctggaagagatgatcctcgcagttttgctgattggctatttctataggcaagacaaagcccagcgaccgcgctggcgctgctgccaaggcagtcctgaagggtgtaggcgtacgttaccaccgttgagcatcaaacgtaccttttcatgctaagatatctcgtcaaccaggcgcacaaggctcgcaaggtccgcacttccaccaccttccaccgccccaagacccttgagctctcccggtcgcccaagtacccccgcaagtcgattcctcatgctcctcgtctcgattctcacaaggtcattctttaccccctcaacaccgagagtgcgatgaagaagattgaggagaacaacactctggttttcattgtggatgtgaaggcgaacaagcgccagatcaaactggctcttaagaagctttacgatgtcgacactgttaaggtcaatactcttgtcaggtatgaagaccatcatggcgcagagtgataaacactccattcgagaattctgtctctaacaaggatacaggcccgatggatccaagaaagcctttgctcggctaacccctgatgtggatgctctggacattgcggctaccaagcttgccattgtctagatgaatcaattttttatgggtctggtgaacttgttttgtttaacgcggtagcttataagtcctggtcatacagttagctacccgtgctgcaacgacggctgaatgatcgttataaaaggtgtcatttcaatgcataatctgaacccacttgggtagtgctgtaggcctcgaagttttctttgtaatcttatctagaggtacttttaccgaaccgctccttggaagcaggcgagcttctggagcctggtgcatccgatagacctctggttgaccgacgaaagaacgcgaaatgacacatccatacttagcgaatgcattgatcatttctagttatacagtacaaattcaatcagctgtcatgctagcagagacacagattgcacccatctcaaacgtttgaccacccctcgccacgatattgattatcacaagacatcatatgtaccaagtcttccattatcagaaccatagcttgcttattgtgagcggagagcttccagatgtttcaaaacagcaagattggtatccatccaccgctccacacagttctgggcacaagtctcttcagactgatccaagcgaccggacgaaatcttcccagtgatacatttcttccagcaaacgtcggcgaggtgatgcacggctaatgaatagtccattagtatattgtgttaaatgcaacaaactctaagtttagatggattattcacttactctgctggatgttcgacttctgagcttcatttgttaggatctggttcaattctttcttgtcagcatcgctgagcttggagacgtcgagctgttgatccatcctgatttcagggaagtcgttctggtgcttcgtcgattgtaagtcgagtaacagggtagtagaagagtgaaggggtttcactaaagaagctgaactgatccccaacaccgcataccaaatttagttcctttccacatatttagaaggcggtgctctggggcagaaaagggacgctgattccaaactattgtagctgaagcctgaaggagcgtccctctaccctcaaaaacgtctataaggacaacatctggctcttactttagattcatcccattgctaatattgatacactgagtatgcctccgatccgaacctcccgcaaccgcaaaccacctccggcggggttcgatgacatcgaggacacactacttgagttcagtaacaagatgaaagacgcagagaatgcgccacatgatggaaagaagaaacatgagatgctgtggtcaatctttcaaataacccatcagcgtaagcatacccttactcctgcaatttttgtcgaatgtagttaactcgcgtgatcctttcacaggctcaagatatatctacgatttatattacgaaaaggaagctatatcaaagcaactatatgactggcttcttaagaacaactatgcggatgctaacttaatcgctaaatggaagaagcaaggttacgaaaaggtattatccccgctttctctcatcctttagggtgcgctttgcctctgaatgtcttccaataccctagaattagcatttcactgacgtcgcgctttttcgtagctttgttgtctccgttgtattcagaccaaggaaacgaattttaatgccacatgtatttgccgcgttccaaaggcccaactgaaagaggatcaaatgatacaatgcgttagttgtggatgtcgaggttgtgccagtagcgattagcattgatctgccaacaccgtcccgggggttcaagcttaggggcacaaaaaaggggaaatgataaaaaaagaagagttggaaatattgccatgtatatggttgaaatcgggattcatggttggttggttggctcttacaaaggcgtccgggttgtatttggtttttctactcctgcttatctggaatcttttcctctgcgtccacatatctcgacattccttctcatatcactgtttcagccgatcgcaaaacaatacccctacaaagaactgcgcactatgttgtgctctagtatctagtcaaacggacatatacttaacctaatagtgtacaaagaaattcattgacaaacgaccactaattatatctacaaccaacaataagaaaaggaagagagaataagcacatatcaaggcctccgagagtagacatagtcaagaatcagactcgtaaaacatggcatttcatgtacatcttagcaaatatcgtcaaggtcataacaaggtcatcaattgaagtcaaaaccaattccaagcctcaacccagcctagaactccaaaaatatcaaccgcctaaaatttaaacaacccaaagagcaaatcctgctgaacacaaactccaaatccccagaaataagaccagcattattatgtgctaagccgcggcatagattcgatgagggagatcatattcttggagtgtaaagatgttgaacacccaattcctcagaagggtagaacctattagggactcagaatagtgacatattgctccgatgatttagctgcggcctaggcacatgctgtctgggtttcgacggttcttctttgcttccgctgccgattttttgaaacccctgtaaaagatcaacaccatctacctctccggggccctcatcaaaaaggtggaaagagaaaaaatcatcatgagtagcatctataaagcgcccggaatcggggaccttcgatggtgaatcgggaaagagaaggcctttcgttttgcttgaagatgaaaacgaaggcaagccgatacggccgttcacactcatagtcgtgatatcagcaagcacaccgctgttcgagccactagcatcactccgtgaacgtttcgcggaacgctttcctggtgaaccatatgctggtgttgaaatgttatccgtggtagtgtccgcaaatacgtcaaaggtagtgtggaggttttcattcggcgtaaaggtttcatcctgaatgttaaacgctgggctccatggtaaatcttcgtctgtgaggcctaaatgcttaatgggggaattgaccatctgctgaatcttcttgcggtggtttcgaagattggtgttaggggagaccgacggtgggggctttgcgggcttcttgaattttatgacaggggtaatgggaggcggcagcatgctaacatattcactgcgaagtggcgaagagccaacaataagtccagcgtctttcagcgtaccagaatgacccggactgatgtcgtgagaagaacttctaattcgagcgatctcttcttctgcacggccacgcttgatacgaggaggttcaatatccaagtctgaagttagtatgtggccagctttgtttggtcgcattgccgaagactccaaagaagaaaaatagccgctatcattcatgccagttgacttccgttttctagagcgagaaacgacccctgtcgccgtaacaccctgagatggcgtaggcggagttccctggcggatgaaccgaggtggcacaattggaggtgatgagtgtatagtctgcggcggagaagaccgcggtgggagggtctgcgtagtaggcccgttcactccttcatcacctgtgtcatcctggagggcggggtccgaagcaggtagtgtcgcgtcggaggacaaatccacattcttcgaagactttggcactacaggaggataggtagacggtggaactgtccacgtggccgtggcagagctctgtgaatgcgtaagctccctttggggagcagccggaagggggatactagacatcgtggcacggcgaaagggtttgtcttttaaaaattgcgcttccatcccaggctcaatggcccagtagttgcctttccctgggtcatccttaggccgttcctgctttatgaatgccttgtttaaactgagattgtgacggatgctattttgccagccaggatcactgttcttataatatgagaacgtgtctgagatccacctatagatctgtgcgagggttagccgcctatttggtgcgcgtagaatagacattccgattagtgttgcataactatacggtggtttcacgccgtcgtcttctataggaggcatttcgtgtggctcgggtaaacgcatcgagttggtgtcttcgcgtttcggctttttcgcgggccgctccttcaatggcgccgcatccatgagcgtccttttcgattgagccctggagtggaatgatggctcaggaaaatccgcgaaattatcactgggtggctcgtctatgggctgactctgtcttgagagcctgtcgggattgacgctgggaaatatcgtgaacaaagccgactgcggcatagacattgtagacgtaacgggatacgcatatggattggaaggagttttctttgtaggagaatcagtagggaatgatggtggaacaggggccgtgatagagacgaagcccagctttcctcctccagacagtgagacacctgaccctcgacgtgtcttcgttggcgatggtttgtgcgtgcgagcgggtggcaagttcaagatacaacccgtgtctgtgacattctccataggttgcaggggtaaaggcgatggttccaattgacgagacttggcaattccgtgctcagtgggtgaagatgaattgacaactgctgacgcagttgtcataggacgggtggagctcatgatgtcgtccggttgagtgggtgccaaaaacgctggacgcgtcgacgaattccttaacgcgagagtatactagcaccgtccaggtgaacgctgcgtcgagtcggccaaagatgaggggcaggggcagcaacgcccaatgaccaagtgaatcgtagtcacccgaaaatgcagaattcaggacaattcgcggtggtatagaaaagacaaaggcaatgcaaagggtcttaggctgtagcgcaaagaagtgggtatttgggccacaaaggcgctaaggagggcacatcgaggccgtggctccaagtgcgaagaaaaagcgggtaataactgtcgagtttaactggattgtgaactgttcttgatattatatccccccctccctttctttcttctacttggaataggctggatggaagactggcgcaggactgcttcaagcctgacagtgctgttagagtgggctcacgcggcgcgcgaaataatagtaaatctagaaacgatgatgatgggggacgggatgaacgggatgtttagagaagaggcagagaagagataaagcgggaagacggcctcactctataatcgaatcccttcacctagtaaggtttctccctcgaggtaaggtggggtgcgcgagatacgttaataacagcagagttatgtacgattacttgggctgaggaatggagagaaaggaacttgatgttaggtgattgtcgcggcctcgtttggcagctaagtatgtatggtatggttaggtcgcgtcgcgtaacgcgtcgagggcggcgagtacattggaagagggtggggttttggtactagtattgtcatgggtgacaatacagaagctcctgtttcaccattggctgacctccttgcttagttccgccacctggaacgattgtcgtgtccaatcaccaggcgatctcggtcgatcattgggccctcccatcagttgacgaggcaagcatgccccggccatcagacttagtgtcaggttgtgtgcctttctaagccaagcccggttttattagatccatactaagctacgtctagattcccaccccatgctttgtgtctcgaaggaaagctttgtgatcatactgccacccagattctaaagatcagccatctcaaccgacaagctgtgaaggcggaatcaacattcgtcatccagcaattgatggggtcgttcaaaaaaaaaaaaaaaaaaaaagaaaaaaagaaaaaaaaaagtacaagcttgaggtgcttggattcgaacaataaatatttaaggctcgttagcttcaatctacgcctggatagcgatacctcaacaagtcgacgaaagtatcgaccgtacatcctgtccctccagcagttgtacagagagcgaatcctaattcaaatgagtaagggacccttgctcaccactatccatgaagttaattaacccttcaattgggatggctcataacacaatcgaacactacctgcgctaattgtctacatatattgtcatgagattggccgaggcaagggtatggaagattcccaggtacccgtgctggcctgcagtagtacttgtgtgtgttccacatgtagcagcattacttcgtgctcccagcatagatagtatttgaattactaatagttacttttagttaacttcttgatcataatcgtgggtaggctagacctccgatgggcacctttgcctttcgatagaactctgttataactccttgaaagagggggtttggaattcccgaaaaggtgacctactatgccagcaaggcgtcgtctaattaaaaatctaagttgacgacacccctgacagaggagtaaaccagtggggagcgaaagttttgttcacatgagctccagtaaattgtacagtgcatccctccatcccgaaaaagcctctttatgaagtgcttgtcattgcttcaaaaactccatgtaaaccctctatgtccttggccgataacgaatttgttctaaatctagataaaggacaaccaacgcctggaaaggagagctgaaacaaatgcgatctatcccggaaacacaaaagataattatgtcagtatagaggaacaaagcgtggtgcatggcagaaaatatcacacatagattcagataaaaagagaggaacataggctctaataagatccattcagacaactccagagtttcaacttttcacatagtcatgtaagacacggaacttctcgtcgtatcgtatagatatgccatgggtatcctaaatcatcagagaccctcgctggcattgtgcagaaacccctacgagaagggaaaggggggaatagaaaggaggaggcgaaggaggaaaggagggcgtctagtctagaaatgtgaacatgctcgtatgaataatgttcagggcacggtctgcgtctctctcttcgatgacgcatgatatattgatttcgctcgcaccttggaggaagagaagcaattagcttttggtcaaccaaatccagtaagagttcgaccccgttgcacttaccttgggagatcatctcaatgttcacattattttctccaagggttgtaaacatccgcccggcaacaccaatcatgttcttcatttgtttgccaacaaggctcaggatggccatctctgggattatatcgactgtcccatatttctgtaggtcacgtaacgcgcccttcaagtcctcgtcaataatttgatattcatccctgccgactccattgagaagaggcgactcagaatgaagagccatggacacatgcacttcactggtggatatcagatcgattgagagcctccatcggtcaaggacagagaagatgccagcaaagaacccatgcgacagggagcgtttgttggagtggacattgatcacgagaatcttgtgcttgatagttacagcggtaggacgcttcggcgtctgcacaagacttggactgcgtgtacggaacaatctggggtcatgccctatggccgccttctccaatttataagaggaatcagggaaaatgatagtgccattgcctttcgggttcatgacattcttgatacgaatgggaattctcgcgcggatgacttgttccatggtgaatggatggatgacctctgagccataaaatgtcagttcagcggcttctgcaggtgtgattgccggaagaatacgcgcagttggcactttccggggatctgctgtgaatattccgtcgacttccttccatacctgtagttctttggcacgtatcccaacggcgactagggcggcgcaaagatctgtatagccccgccctatttgatcaagaagaccgcctggtatggtcccaaagaacccagttacaactggaactctgccctcacaagctcggatttttttaccgagagtgctggcgaggttgttgtagaattcctggtcgagaccctggcttgagatagtaaagtcgacaatctcagccaaatccacatattccgaatctactcctcggtcctggaggaaagctgccataagtcgacaactaagcttctctcctgtactcataactttatccacacagcggacactgatctccccgagcgtctgagcagcctccaagaccttcagaaccttttcacattcatcgttaatctcggtaactaactgaagccttagtcccttggaattaatttgactctcgactacttcgatatgttccaatcggaccgcctcgacgagagagacgtagtttttagattccgcattctctgcatcccgcgctgcgcgtaacagcctatcaattgtatcaatatcaatgttgattttggatgagaacaatagaacctgcgaggcagggcaacgcctaaccggggtggagaggtgactcaccgattggtagtaccttcagcttttgtagagctacttcttgcagagcagactattgccacactgtgatctaaaaggctaggtcttgattgaaggatgtcagtagcagctatctctatatttcatcttgttgcttacagaacaacttgatcaatgatattaagggcgaacttgcccacactggtacctccaaacttttgtacaacccagttgccgtttgaagggcctactaggtcgctattggatgtcgacaacggttccaatttggatggcaaccgagattccatgctggagagtaactgtcaactcagactttgttctcaaaaggcgatggcgatcctcacattacttgacttcggtagcgggatagcctttttatgtgcactggcggggttgcgaaagcggagcccctctaatgatacggggtatcacataatttttcctcttctccgccttccgcttgtggaatacgatatcggagttggttcttactacacggtacatactccatagatagagctagtatcaggtactttgtaagtaattactataggtactccagtacctccatgtgtaactcgcttctctcaaggcttggagccattctaatttgtacaagtgatgagcaatatgtatagaataagtatacagcacatgtataggtgtatatgtaaaaatgatcttcgctctcgtgggatatatatagctatcctacttttgtagcattcgggtgtcgagcgccatacgcttttgtgtgagtcatctctctgatcatggatttacgaaaactactccggagtaggtatcgaatattcgtcaatacctaacacgattggcttgcggagtcctctgtggtacatacataccgaccaattggaacctagagtatagttccacttttttgtagcaccgatgagtaccggacctaaatggccaacccacctaaaaaagacacgccttgctaggtcccgagtcttctccggtagtcgggtagatatatggccttagtccaacctacaactagtacttcgtattagtgtcattgtcacttgcccttatctccgttcccactttcatttgctaactcaacaatctctaagtgaaagaggggcccttagatcgattactatggatcctgcaagagcagaagttccaacatgtccgttctgcacctttcctgaacctgatggtaattctaatatggaccattttgaggtatatcatcctgagatcgacagacggcttggtgtcagcagtggtaaaaaggctatacacttgaacaacctgaagatatcttctgactgcaggcaacatctatccgccagcgaggagaacgagcatttaggaaagtacacccattgcccacgtggttgtggggagatagtaatggacgctgagcttcccacccatcttgaattacaccaagcagaagaaattacccacgagagtacaacatcttctccgccagagttctccggctcgtttactgctcagaagcaaagcagacctggcgattgcgaagacctggacaatgcccagtactcacatggactgtttgtgaagagccaactaaagaaagagaaacccactcaggaagcagtgagagaaacaagaccccgtagtccttcgaatataacgcttgccgtgaaaaagcttggagtatccgaccccttctctgcgttcttttccctgtatcttgcacagtttctaggtcgtgagcctgctgataaatgaaatagcgcaccgaattgggaccatatgctcatgagaagcaaatgccttcgtggcttcgaaaattattagaaaaaagagtcaagataacagagtccaatataatcgctccagatggaacgctgcggagacatcgttcaacggagaatgagacgacagatgttgttccggtgcttgttaggctttgtgaacaggacaaatcagtacagcgtgctttcttctgtagccctaaagttcatcaaatctctaagatgccaaaagagggggggttttgtggctacagaaatatccaaatgctaatttcctacatcaaagaatgccgcattccgggacatgaatgtttttcggagacatcaccaacgatcctgcagatacaagagatgatcgagagtgcgtgggatatgggtttcaacagcatcggacggattgagacaggcggaatccgcggcactagaaaatacattggcacacccgaagtaaggcaggaatacttgagggtagatattccttactaacgttctttttttaggcacaggcgctatttttgagcttaggaatacagtgagtttacaccgaggaacacaatgggaatagtactgatatgtataagatgcgaagccagtcgtatcggagtaaccaaagatatgcaagctcatgacgttttgttcatgtacattgcaaactatttcagacaggcgtgctccttggatacaaatgacaaagttttcctgacaaacttacccccaatttacttccaacatcaaggtctgaagcgttcctctctgtcattaacctctatctgttgaccttgtgtctggggcttaccgctataccatcacaaatagggcactcattgaccattattggattcgagatacgtgacaatggcagtgcgaacctcttggtcttagacccaatgttcaagccatcgtctgctgtgaagcggctcagaggtacgcgcgcagtatctgccgatcccgctcggatcctaaagggctaccgacgaggggcagcttatctaaagaaatataaagtgttcgaaatactcaagtaagtcacaactatttactttactgagcagcgactgacccttttaggctgtctacctcccaagaccttgtccaagacttgacttgtacaaagccatagatctttttctgggaccatgacatcaggatcattacttcaactatcagtgtggaaggaccattaagagagagaactaaagtaaatgaaattgacgcttgcaaggtccaatggttgacctccgagtaagtacctaactagtagtagtgaactttgcaccgtactccgtactagtatttaatgtgctatatccgtcggatcggacccacttttcccgctgaaataggtgcctgaggtgttcgtttataccccacgtaaaatttacccattgccatcatgttttacatgattatactttcgtttcacaggaaagcaactggacgtttcagtcacccagcactctgcctagtgtcatcatgcgaacagccccgaatgtgattatcacaggaacccctggcgttgggaaaactgtccactgcgaacaactagcgcaagataccggtctgcgacatctgtcaatcaatcaggtcgcaaaagatcgtgattgcttcgagacctatgacgaggagttgaaaacttggattgtggatgaggataaggtacgctgagtatatacgctctctcctccctggaagtctcaattgaataggatttctctcagattgcaggttaattttccctctacttacctggtctggtcaatatagctgctggacgctgttgaagatgagatgcttcaggggggactcttgattgactggcatgcatgtgatctattccccaaatcttggattgacctcgttgtggttttgcgatgcccgtctacatctcttctatatgaccgtctttcatcaaggtatctacaggcggatcccgccaaccaccatctatcccccatcttccttcattttcagcaagcctaataggatttcacctgttgcaggggatataaggacgcgaagctacaagaaaatttagacgcagagattttcggtgtcctattggaagaagcctgtgaagccttcgacgaagaagttgtggtcgagcttatgagtgaaaaggacgacgatgtagagggaaactgcgaaagaatctcaagttgggtatcctcttggaaaatcaaccaaaacctcaacgcgaattgaaatattttagagatgcaccacctatcaacgtcgtccgccgcggagctgagaaattaggatttttcctggaccagccaacgctgtaatttctccaaagctttatacctgtgcgatatttggttctagcagtttgttagcgaggaagtcgaggacggaggggccacgttggggaacaatcagggaaatggagaaaagactagaaaggtagtggttggaaggcaagctcgggaattaccttctcctccttgtccatctcagcatacgttttcccttcatattcaaaaatcggatcccaacctaaagaccatatataagctggaaattccggacgtagcagagagagattatgtgtaccaaagtttgatggacctctcggtctgacaattacaccctaaacgttgaggtcagatttcgaaagtccaaaaactttgcatcattgtcaattaccttcgttcttccctggaataaaattggctctgagccagggccgtgactgaaagcgaatgtacatatcgcatctgccgatttatcctcgaacgaatcgagaattttattcaacccctcatggcccaaaacatcaagaaatggcttgcttaggagatgtcagtacaaaaagcaaaaatttgtcctggtaaagcctacatgtatgggccaggaagccctttcagtgcataaaactccagtgccgtgtcctccgtgagaaccgggcctttgatctgttcaggcaatattagcactgtaggcgagatggaaagaatatcacaatgtttaccacttccgctgcacgcctgcacttttctctggcaatttcttcaatagtcccttgtatctccggaatatcaagcccctggttatcgacctcgattgcattgcccagaatcgctctgacttcggccagtttgtttctgttgctggtgatgaagttcaatttctttaatgtagtcatggtgtctgtgccgccaattttgaattgctgtttagggagttcaggggaacaaggtaggaaaagaggctgagacaggatgttatactctccttgctaattaacatttacaagtagagtgaagatcgtaagacagaaagaagtctgacatggccgggattgtttctattcgtatcggaagctttgcttccccactactccactagcgtggtgccatatgtactacggatagagagtatatgttttcagtaaggtagatggacctcaactcaaattgctatttacaagtgagactcgaataaaatgaaaaatctaaacagagaaaggtgtggcatatgtcccacaccgctaaaaacagaataaggatgcgtgctgttccaaggtaacagaaatgcataatctcatcatgatccgtaactctaggaaatgacgacaagatgactccttctaaacggtatactcagtagagtagcatgtttttactcgaccatagccttgtactacagagaagtacgaaagatatcatgccatctccgccatttcaagcctctcttgctgagccattgcctgagccgagacaatttcagcaagacgttttagtcgtggtgtttgcagcccttcaagcaggtcagtgattatcggacagcgctgtcacatacgaaacttacatgacggtgtgtatgtctccagggctgtgataacacgaggttcggcaatctcgtacggaccactatcctccatatcaacaggcgtcagaagcaatacgtcgctcttctccgtgacacgagaggccacagctttcatgatctccccattaataggttgctcataatccgccaccaagtattgattcaggagcttctgaatctgattcggggagagcctgtatatgaatgtattagttgtgcatatggctcgatgatgtggcaaaatcaaacatggggccttacatccaacagatgtcctgaataatctcaatgtcatttagtgtagccttttttaactgaagaagtttggtcgcttgctgagaggaggttagtatagggggccaatcatatgtctgaatattgtcttaccatcaagtgctcaagctgcaacgtcccttccggcatatcatggcttttgcaccattcttcaatacgtgttatattgtaatttatttgaaggccacgcttccaggacaagaaattcctcctcatgagaaggtcgttgaaagcggtgacaccaaccagacgaagaagctcggtaacagtctgagtgacaatcgaatcctcaaggtaaaaagccttcattgccttgtagacattgttcagaaggctaagaaggttgtccatactgtaagctgggttgttgttggaaggaagaagctttccaagaaaacgattcgattcacttgtgacaaatcctggaagtgattgggattcaatgatcgcaggaacgatcatcttaaaaagcttctttttcaacactttcatccaggtatgatagatgttgaactcgaggctttccaaatcgtgctttacaatctccagtagccgatcgtactcgtaattgtcagtcttttgtgcttcataccaatcctcagccaggaacacgaaagaaagcatttcatgcacattagacagccaaaaggccccggggtttatagcatcatctccatcatgttgcatgacctcttgttgaatcgactgcatcacattcgccaaaaaccgttcggattctttcacgaagccgttattccacatttcagatgtcacaaggtttatcaaataagcagggaatagaacttctttttcggttggtggcggagtagaactagggagtggaatctttagattgcgtatcaagcccatcgtgacctcttcgttgagttcatcctcttcagaaagtaaattttcgagctccacctcgacagagtccaatccaggtgagaaagtgctccctgataggttttggcgcaatagggagctaggaacagccatggagacgggacgtgggttgtaagcaccgctaaaacgatctgtgtctatcctctccgcaccggcgctgcgtctttttggctttgtcttttttgaggacactaaattaatcaacccactggcaggtggtgggatggcgctgccgtttgattgatcaccgttcaagccgccactaggtaaggtcctcttcgcaagctctagctgctcttcgaggtcagcgatctgttgacggagggaagctttctcatcatccgactcggtgttcatttgtttaagccgttgcaactcctcatttgcagaacggatggattcccgtgacgctttttcttcctcttgcagccgcttaattgtcgcttgcgcttcgctatgattttgctgcaatcgactcatttcttcttccatggcagataaccgagcagcattaattcccgcctggtttgcctcggcctgaagctccctagaacgattctccagggcgttgtgacgactcctccatgacttcaactgagtttcatagttttctaactgcagattcaacgacttgttttcacgttttagagactcgagatactgtgtcaactctaccaccttattctccagcttgtaagagatctgctttaggtcccttgcatcttcgcggagctttttgtattgtatcctcgcttgcttacctctccaaaggttctgcacaatgacaacttttcggcgatactgccgccaagctcgtaattgtcgccaggagcggaaggcacgttgtataactttcgcagcgtttccatgtatcgtatccattatattttgccggcagaggaagcccttcgcaaccgattgaaacaaaatgaagtttgcacggatgatgttatactttttcctttccttgtgtccccgccacacccgttggatggaagttgcagctttgaccttgcgcacctcggccgcatgctgccttgctaagaaccctctgattaaagcttgagttgtaagaatggaagcacgcgcctcgagataacgacgtcgatagtacttgcaccgcagattcttttgtatcatgattgcacattcgttcaacctagacgtacgaaggttttccaggaaagcgagcatgcctgccctgaaaaatatcttcgtcaaacctagttgatatttatcttgcttttggctgctgccatctaccagagctttttgcaggattgcatggcacatttctcggatttcagacgtccactgcgatgaatggcaaagcatatagtagcgtatcgcaaactcttcataagtccagcgagtaggatatccagcagtgctgatacggaccgtttcgagtacaccacaagctctcaattggctaaggaccatgggaccttcaaacttccaagcttctttcgcttcgttgggcttgatacagcgtatatagtgcacatccgtagaatttatggtgttcataagctcaatcagcgatgatttgaagatacctccaagtgtaggcttgcggttgacggccacgccaattttacgaccaggcgcagcgactggcttagatgagatggatgcagagtctttttcgcggacggcggcggcggtatctaatatatctttcacgaattgattcgaggagttgcggagaacctccatgtgctcatccgggacagtatccctgttcttctctataaaaccatcggactcataagttacgtccacagcataatgacatatggtgaacgccgactttccgaaccggggctttttgtagaatttttgcttatcggctgcaaagttatgatgcagttttgtcacaaattgttcatcagaacccatcggcagccgagactcctcatccaaaagggataagatacccaattttgcctcaataaggtcaatgcatggttggttgtctgagaaatcaatgaacgtccagtcaatttgctctcgaacatattcttcttgttccagtttgaatacgtgctgattgaactcttgctgcaacttctcattagcgtagttgatgcaaaactgctcgaacgagtttttggcaaagtgctcgaacccatatatatccagaacaccgatgaaagatttaaatttgttaagaacttcaccggacgctaggccgcgattgattttttcgacgagccaatcaaagagacttgaatatataaactttgctaccgaatcacggacaactgtcgcctgttgttgtgtcaaattagatgtgatcttctcacctcttgttataagttgcttcttgactatccatttcgcgaattcgttgacgtcaatgcccagcatgctgcaggccctgacaagggagggctcagagggaggtaaggaagaatcggttcgagtggcggtaattctaacattgcctagatgcaggagagctgcaaggatgcgaaaaatttccgcctgtgtatcttctgacacaccgatagtactcagggatttccttgtagcattgaattctgccttgtcatccacgccatcaatagtcggcgtgccgccttggttgagatagtcgaagtcctcaaccgacgcaagaccgagttcctgcttttctgcgtctgttgcaccagctacaagctgataaaagatatgataattgcgttctttgagaggttgaaatactaaacgggatctctctaacaggtacgtcctgatctttgcgccgatgatattggtcctatcatcgaacattatctcaatgtactttccgaaccgtgaagagttgtcattgcgcgttgttttggcgtttccgaaggcttccataacaggatttgtagccaggatttgctcctcagtctcactgatagcatctgccctactcgtggtgtatttcccaggttgatctgaggattcgcgagttgcgaaatatcgcataatgtacttggcgctaactgtctttccagcaccagactctccagaaaccacaattgtctggtttttcgcatctcgcaacatgtcactgcaacgcttgcttgtgagtaacagcatataacaagagaggtgagtcgtatcttacgcaaatgcctcttcagcgatggcgaatagatgaggcgcctgtgatgcacggtgtttgccggcgtacacttgcaccatctgaggaacatagagtgaatccactcgagcgaaagggttagtggcgattaaaacaatgccactataagtatatatttccttttgcgcataccgtaatttgatagcctgcaagacttcagggtagttagcccctcactcctgggggagtactgggagtatgaaacaaaccagctggctcattcaagtgagatagattcgtcaggtcttcgctggcctccagcatggctggattcattaacggaggtagcttaggattgttatccacctgtaactctgcttgcgtggtttccaaagattttgtcttttataattattgaacctagtcagtcgagcggcccaagggacatcaaatggattataaagatgagacgaacctccccattttccaatataaacacaagttgcactttgtcaccatcaacaagcttctctttgacctcggatgctacccatccttcagtcggatcgggctgccaggccctcgttccgacctcataattgtgcgccatcaagactgagttggccagggaatctgtagcctaagttgaaacgagaccgaaccagaacctatgcggaatgtatatgacaccgagcgagcactgctgtaggcatctagcagcgaatcattaattggatactcggttgatatttggacggggaaacggatcaagggaaacagaaagccgggatataatcgccttatgacaacaccgacaggcctgaacttcaaatcatggaaagaaaatggagactatcgttttaagagaagaggggagttattgaactggctaacagctggccgttagcgagccgcgacccctgaggctggagagccgcgccactcgtcgaaaacaatctccacacctgtcaacgccaagaatcaggtatgggtacattgaacaggtactagttagtagtatgtatcactaatcatgacgcccatagctctgtggtcattcagatatctatgtaggtttggaggcctatagacgaagaatttacgacatactgcgcccttcgaatttcagactcgttttctactcatcattcgcttagcctcaacagtatgacctcgagaggtgaagtcgactgccgcttaggtgctagctgacctagggcccccatgagtggagtttagctagatagaaaaaaccagaattctgaataagcggtgagatcagacccatcggtttaaaagaagctccgacgtgttataggaagcaactactaagtaaacttacgatacatgcttatatttgatattctttaccatgtgctgccatcatttatattttcagaagcatagggcagatcgttttaggacaattgtaagtaattgaacggaagcgaactcgtcacgccgccagcattttatatggtaaggcggaaaacagtattaaagaaaagtaggagagggagaaaaaggtcgtcggtgaaggagtttggagggcgatgaggaagaaaaaatgattagggaccgacactgccttgacggttccatccaacgagctttaccatccactacatgcccaccaatctgatggtgaagtatgcatggttacacataatactttgaccatacatacagcggaccgctattgaatggaacaggagccacgcatgattagaagaaacaatctgagagaaacaaagaataaaaagcaggcatcagaagtcaggtggagatatggattatagcaccattcgaatttgcactttcaacgattagctgactgttcagctttgtttgcattctgcggcctcctttttgggcttcgaagtaccgtcctgcttaatgttagttttcatacactatacgtggtagttctgggtgagatggggatgggtacctcttcatcagagtcgtcatcaacgtccccatcagacttcctgtcgtcgtcgtcatcatcttcatcctcttcctcgtcctcgtcctcgtcgtcaaactcatcaggatccatatcatcgcccagttcttcaaactgaagagcctccccagtaaaccaatcgattgcgcgaggaatgagcttctccttgatatcctctccaagctggtagtcaagctcaagccgctcttcaatgtcggtagcgacagtatcatcgtcgtccgttgggggctgtgggggagaaaagaaattaaagaaagactccgtgggtacggttatcttgacaacgcgagtttgctttgtgtctttagaatcgagaaattagcttcatgaccttcactttgcttgaacttgaactcactcttgtttctttgctttttactttcgacacgaacagtgaggtccttgtcgtctttccaatcaatcttagtgccctcggcatgatcatagatgaaatcaccaccgtagccgttctcttccttgtaatagtacgttttcgaaatagtcttgtttgtgaagaatgaattctcagagaattcaaaaatcaggcgaaatcccggacgatcaaggtactccattcggatatcggtgagatgtctgagagcctcttcatctcgttcagtcaccatctctgccagagaaatttgatttttcatagcagaaagccagaactcgggtattccggctgttgatgacaccttgtcctcggactttttagactcatcttcgctcttaacatccacatcttcttcctcacccttgcccgcatcaacttcactgtcggtcggttccgcagccccattgacaatcgtggcacgcctttgatacagaggagtaaattttgcaaagtacttcttttcgagctccaacacttcttcttgaaattgagcttccagcttagcgtgttccttctggatacctttcagtccagcgacacgtcggcggacaggtgcgggcagagactcaatatatccggaagagcgaccgacaagtgatcccaattttccttgaatcatggagacgagcccagggtttctcgcgaataaagaagcagctgtggcatgatcaagggattctagggtgacgatgttagagataagtggctggcaaggagattgctcgagtgataccttctttgatgctggagactccaggctgctgggcatgggaggaaataggggcattattagctggggtgttttgaggcgtcctattctcgtgaaatatcgtttagaaggcaagacgtgcctaacaaggaaaatgcgtctttgcatatacggggttaagcaacgcaaagagacttacggggcgaccggaaaatctgctttcttattcctaataggctcagacattgtgataatgttgttcaataggcttatagatgggtcgagggagatagtggaggttggttgaggggttgtcgctgatgaaggtcaagagatgaggaagaatttgatacgcctaagttttgggagtctggaatactggcttggtgggatctttagcgcccttggaccgaggggcttggcgggactgagacctctgctggttgagaacctttgaaaccctcccaacaataccttactgtaataacagctgtaaacaatgatactatgttagattggctcgtgactcgtcacctatgtaccaataccaggtaggaagtcccctcagatattgaatacggcattaatgtatcacgatgtttaagatacctagattaagcaggctggctggatttactttagtatccctaatctagattgatactgagcattacttacagaaacaattacctacccatcgataccactgtcgctccgcatgataccttcgtcattgccccccaatttcagtcatattgacattctagtattgaatcgctccgatataaatgattaatgcggctcaaattgttaccatgcctccataaggacccagagtatttccattttatgaagatcgattcttcaatcctgtgtcatagccatcaaatcggaactgataaggaaaaccataagtacgctgtactgagtcacgtgctgatagaaatacaacgccataagttgactagatcgcccttggtgtagtcataaggcttctatggaccggttccacacagttcatggaactagacctcgaaccacatgggctacacttgtatctgtcgttcactaatccatgttaccataagccctgcatttgtttccttttctctcttcttcctttcccccattacttggaaggacgttaaaggaaccgactgtgaagatgtatgatacagtgacggactcgaagctatcgccgacagagactcaggtgcctgagatctcgcggtctatgattagccaccggcgtgactctatgcgaagcaggtctcaaaaaccaagctgaagaacggtgtttgggcattgctgataccttcgtagttatagcgttgtctcagacgtagagatggctcgccacgaggtgcgtttgttttccagaaaatactttttatgtgccacgcataactaatgttgagtaggtttttgatggacccatctccgagagtattccatcaagtgtcgtttctttctctcatcgtcgcaaccggaaggactcggtggtcagttttacgtactttcgtgatgaagaggactttgtggagtggccagatgaagatgctgtggacgctgaaagcgaagccgataatttggtcgtaggtgatgttagcccgccaaatggatctctcagatcgtcattcaggtcaaaacgaccatcatggtctagaggttccgctgaagaccccctcctccgcggccggcacctttctgttagttcgtatgcacaggaccgacgatttgatagcaggctcaaccagaaagtatatattgaatcggaggatttaacgcttgtgatagccgggttttcaaccaaattctctggcttagttctatactctctgttatgtgtcctctcccttggcttcgcttatcttatttttcgatggtttccaagatggcgagtacgattgacagggaaacccacgccacttcgcatttgtcaatgggttgccattgaggtgagtaattaaacattccagacggttctcgctatacctaaaactttacaggaccaatggaatcaatttagcgtatgtcaggttcgcagtcaagcttatgggcgtccactttctagcgtatttgcagacccagacagtcattcctttgacgaagaaaatgaccccacgatctcgttcttacgatatattaactgtagataccttcggttcttttatcatcctctggaagataagttctgcctaataagtggttggaaagatcctttgtggacaaatgcgaaagtgatgcgaagcggactagatgccgatgatcgtgatagtcgagagcagattttcggcaagaatcttgttgacattcagcagaaaccattgtttcagcttctcatagatgaagtaagtgatgaagccctcatcgcactatatcgaagaggagttcttaccagtaaaggcctttcacccattttatatctttcaacttgcgagcctcattctgtggtctttggatgaatattactactatgctatttgtatattcattatctccgttttcagcattggtgcaacaataattgagaccaagtctgtaagtcactacccttgccttgacaatatgtaatttcttaacaccattcagactatgagtcgcctgagggagatctccttgtttgagtgtgacatacgtgtgcttaggaatggattttgtgagttggtgccttcacattttgtcggtcagttactgacttcttacgcgacagggaggtctgttccctctcgagaacttgtgccgggagatgtattcgaattctccgatccatcacttagccaagtcccttgcgactgcatcttattgtcaggtgactgcatcgtaaatgagagcatgctcacaggtctgtccgtatattatctgcacgtttgaattggaagcgctgacaggaccaggtgaatccgttcctgtgtccaaaaccccattaacggacgatgcactcaagtatctcaatctcaacaccccctctgttcatccaaacatagcaaaacattttcttttcggtggtacaaaggtcattcgagcacggcgccctcataatgttgatgatgacgatgccattgctttagcaattgtcgtccgaacggggtttctgacaacaaaaggcgcgttggttcgctccatgcttttcccaaagccttctggcttcaagttctatcgagattcattgggttatatatcggttatggcaatggtcgctattttaggatttgtggcctcctttttcaactttgtccgactaggtgtaagcatccagaaaccattccggaacaagctaactttacctagctctcatggcatttgatcattgtcagagccctcgatttgataacaatcattgttccacctgctttgcctgctacgctgacaattggtacgaactttgcgatttcgcggttgaaaaaccagaagattttttgcattagtccgcaaaggtgagtatcatgtttctgaacgcccctagctgcgctaagctggtctgtagggtaaacgtggggggtaaattagacgtgatttgttttgacaaaacagggaccttaacggaagatggattggatgttcttggggtgcggactgtaaatcgagaaatggggtttgtcatactcggtcaattgtatttcggctgtagctaactcatataaggctatcagatttatactcggacgtgactctagggtctcccgcagcttcaacatgtgacacttcttacgaccgcaagaagcgtgatgttttgacctacatcatggccacgtgccactcgttgagagtcgtggacggcgagcttctaggtgaccctctcgacgtgaaaatgttccaatttactggctggtcttaccaggaaggcggcagccatggtcctgaacagccaggttccaaatttgaaacaataatgccttccattgcaaagccacctgccatttcagagaatcttcgccggggcaatttcactgtaagtatactttttctgtaccagatcatacacttcgacttgaaatgcatataaccgtgaatactgataccagaacgatgaaggcaccacttgaacttggtattttacgaaattttgaatttgtctctgaacttcgacgcgcgagcgttattgtaagacaatttggtgacaatggtgctagcattttcgtcaagggtgcaccagaaagcgtcagagccatatgtcttccagatagtcgtcagtacatccaatgggatacgagcacaaggaatgacgctaacatttatcccaactacaatagtgcctcaagactttgaagatctactgaaccagtacacccacaaaggctatcgtgtcattgcttgcgccgctagatacgaacagaagttgagctggatgaaagtgcaaaaaatgactcgtggagatgcagaaagtgatctggaattcataggcttcattatatttgaaaacaagctgaaaccgacaagtaccgagactattgctgaactgaaccaagcaggaatacggaccgtcatgtgcacaggagacaatatccttactgcaattagtgtcgcccgtgagtgtggcatggtcagcaaaagtgagcaatgctttataccgcacattgtagaaggttagttagtactgcttgctctgcccacctaggctaacacctcgcaggtcgtcctcatgatttggtagcttcactttgctgggagaatgtagataatccagcattgaagcttgatccaaacacactgatggtgcgatattccctctattctatacgaaatggaactgacaagttatagccttccgtagcctcatcggatttggacttatctatacctgtaaatgtcttcaatatacataatttctcgcttgcggtcagcggagaagtatttagatgggttttggactttggcgatgagactatacttcaacgagtatgtacatctttcgtttgtcaaacataaccctctcggttgggttcctttacatgaacatcagcttacttgaatccagatgctcgtgcgtaccaaagtgttcgcaagaatgtcacctgatgaaaaacacgaacttgtggagaaacttcagtcacttgattattgctgtggcttttgcggtgatggtgccaatgattgtggcgcgttgaaagctgcagacgttggaatatcgctttctgatgccgaggcatctgtggctgctccgttcacaagtcgccaatttgatgtatcctgcgtgccaactttgattaggtatattcgcccctctcgaatgaagcagccgtttctgttaaccagttcatagggaagggagagccgctttagttacaagcttttgttgcttcaaatatatgagtctctactctgctattcaattttccactgtcagttttttgtacacgtcagcgtcgaacttaggtgattttcaagtacgcatcagaagaatgcatattggtataacaattactgacttattctagtttttattcattgatttggtcctcatattgccaatcgcaatttttagtaagtgatacagctcgactcggacactagaagaacgatatatggtgattacaataatcttcatgctgacctatctttcaaagtgggatggacaggtccctaccccgtactctctcggaaacgcccaactgccgatcttgtctcgcgaaaggtgctgacgccattactcggccaaatcgtgatttgtatactggttcaacttgtggcctacaaagccgtccagtcacagccatggtatgttagcatttgcagttacttcgaacggtataagttgagaaatacatcctaaccctaactacaggttcgaacccccagagatcgatttggataatagtaatattgagaactctgagaacaccaccctgttcctggtctcgtgctttcagtacacgctagcaagtgttgttctcagcgtgggacctccattccgggagcctatgagatcaaatagttagtaaccgtttcttgccattttaagctgtcgctaacagttagtaggagccttcatctctgtggttataatagacttaatcatctcatgttatatgctcttcaggccctctagatgggtagtgcagattatgcagttgacatttctatcagggaatttcgctggttcgctccttgcacttgctgtgagcagcttcattttctcttgcatcgcggagcgtgcacttttcccgggtcttgctcgggccctagggcgagcctacgtactcttacggccaggccatcacaaaaagcgccgtcaatacaaggtgcttctggaggaaatgcaaaagtaaataacccaaaaaatcaagtcatcaccattgtggtagagcgatggaattctacttctcaaaagcatgcaccgcatccgttacgtctcataacccaacatcttcataagtcgattactctgccgtaattaggctactgccacttcgggaatcctacaacactaaggaaagatagcgaagtaatgtctgtacgcgccgttcccatctaactggagaatatcgcgaaatgagaacggctaattgattcacgatggctaatgtaaatcccgcgagcttgttctgtgatgtatttgattttaagtacttagtgttcccacggatgcttccatcccaataaagcagggccatccttcttggctcggtacattagctagttgtgagcaactatagttagcatcattcattgaaggaaatctatgattaggcccgtacaaaaaaccacatgctagcgcccaacgccgtggctgtaaagcgataaagaggacgtgcagggtgaatatgaatggggtgattcgcagccatgtctgtatataatatagtcagttcaggtttcattagtgaaagagagtcatctagaggtacctttgaagatttcttttcttctcaacaatataacttgaattgggacgatgggaatgaatatggagatataagagcaaggtccatcagcaccaggttgcattcgacgccggatgtatagtcacgtgaacctcaagccttttcaggtctcaaggacatacgggagtacttcgaaggcatttcacgcctctacaaatacagcaataaccatgactggatgcaatcccttatcacctgtcaaacactagagtgtaaggactgttatgataagtgctatctagctatagtttcttccgctgtgcggtttgcgatatcccatacctctgcctcgctcatagaccctctatcctacattccatcgcccccagctccctgtgcattgcgcatcaccctgataatcctggtaagccaaacttactccgagtatatcctcggttcactgagttccgccatcagcaattgatcttgcgcaagcctcttgatacagaacaatagccattcgttggggcgggccattcgccatacactagaagaaataagtattgcttgccgttactaggagaaaatggtggtagcttctctcgaacgggataacaatggaagctctcgatttcgcggatgcactggcatccgggagtatgagttccttggtaaacttggtgaaggcacgtttgggtaggtgcccgcgtcctgtaggcaagtcaatatattaaatttcttggccagtgaagtctacaaggcgcgatcgaaaagagatggctcaaccgtcgctctaaagaagatcctcatgcataatgagaaggatggggtaagatagctacctgctgagcagcaaggctagggggctaattcatcccgataaagttccctattactgcacttcgtgaaatcaaactcttgaaaatgctatcccacagtaatatcctccagctaagagaaatggctgtggaacgaagcaaaggtaggaaggactccactttctccttgagagaggagctgaccctgggccaggggaaggccgaaagaaaccgagcatgtacatggtcactccctatatggaacatgacctgtcggggctcttagaaaacccagccgtgcaatttagtgagcctcaaattaaatgctacatgctgcagctccttgagggactcaagtatctgcacggggtaataccatttcctaaaactgttccaggatctgtttctaacttgacgcagaatcgaatattacaccgtgatatgaaaggtcagttcccacacaacgcaatgagggaatggaccttgtaactaactctcacacagcggccaacctacttatcagtaacagaggtattcttcagattgccgatttcgggctagctcgaccgtacgatgaacctcctcctcagcctggaaaaggtggaggggaggctaaaagagactataccacgttggttgtgacacgatggtaccgccctccagaactcctccttcaactacgacgctatacaactgcaatcgatatgtggggcgttgggtaattctctcagtttaaacttcgtgatttgcattctgatggtgacaggtgcgttttcggcgaaatgttcaagggcaagccaatccttgccggcactagtgatcttaaccaagcccagcttatatttaaccttgtgggcacaccttccgaagagaatatgcctggctggagctcgctccctggctgcgaaggtgtgaaaagctttggcagcaagccaggaaatctatctgaggtcttcaaagagtacaggcatcccacatcttcagaatcaagtttaacggcgccttcatacaatactgacttactgataggcaaaatccagccgccatatctttattaggtgagctcttgaaacttgattggcggaaaagaataaatgctatcgacgcgttgaaacatccttatttctctaatcatcccctgcctgcacaccccggtgagcttccctgtttcgaggactctcatgaatttgatagaagaaggttccgagggcagcgagcagttatgcccccagcccctgctggaggctccgtgggcatgggccctaatggcggctggagctcgaattccggaacccgaaccggtgcagattctagaaataaccgcataccaggtgctgcgcgttttgggaaatcaaactctcacggtagtcaagggaatgccccccgacggtcttttgataatcgaggtaatgaaccacatcagagtcgggcaaagcaagatgattcacatcgggctctttcatcatggcagaaggaaggaggtctgccgcctaagcctcctctgccctctcatcagggatgggtgccaagctacaccggtcgtgtaggacgcgacaggacccatttaggtcggtttggtggacggccagacagcaatgtggattcttatgttccgacttataatggcgtaggggaacagcctcgagatgcatatgtaaacaacaggcgcgattattcaagggagaatccttcaaggaggcgcagtcgaagcccaagctttagggaaggatctcggcctgcagacagggatttatatcgaaggtagattgatagccgatttattatctaaggcacaaagagccttatgcaatgaatatggttgtgcttcgatatgcacctatcaaccctctttttagggtggcaggtctcgcaagtgctgttgtgtctaggaatttcaacgactactgcttaggtttattgcagcttcaagggctctattactactctataagtttagcacttagaggatgggaaatttgaaggcaagtttgcctgttttcaattcagcaggactcttaaagtactaagagaataaaaaaaagcaacaaggccgaagtgttgaacaaacatttctccgtagacatcagtatgatgcgtcgaatgtgaacagcatagctgatgtttccattatccgggcgccacttgacaaaatcaataacctaaagctttcagtcatttaatcagaaaccagcgcggcagtagcataagaatcaataactttcttgtttagcagacggtagacttgagccgttgaggggtgggttctaccgaaatcaaatctaccaatagatgatcttagtgtgaggcttccatacaccgagatatccttagtataatatccgtgtcataatccgggctacagcaactagttgttagcattgtggctgaataagaagataagggggtcatacatgaaaggctttcgagcctctcgtatagatctttgatagtggtattatcaacgttgctgatatcagccatcaggtaggccacctattcgtagtcagtgttgagatattatccgaatgtgggtagctggtaacgcacgtcacctctgctatcggtcatttgcttgtcgacgttgtggtctccgaggatctcgttcactaatatcatcagtcccggctccatatacacacacaagcacatcacttataaaacacacctttccgtaagacaccggggatgttttgatggatgtagatcacctgtagttaaaggattaacgacgaattccacggaatgatgctggtaatataatgatagacgtactcgagcatgttccggttcatccatggtcaaggaacgaagggcaacttcaggaaggttgacggcacccaaagttgtaccttcgttgacatatctcactaaagcatctcccacctccacaccaattgcacgctgtgcttcttcggtgctacctccgatgtgaggagtaaggattacgttcttaaggctgcgaagatctgctgtccagttgttaaggtcgctattgaagtagtccccatttccagcaggttcgttcgggtagacatcaagcgcggccccggccaccttgccagaccgcatcgcgtggatcaatgccgggatgtcaacgacacttcctcgactagcattaatcaaataactgccgtcccgcatttgttcaaactggcgttgtcctatcatgtttttcgtttccgggagttccggcacatggcatgtgacgaagtctgactgggaaagcagactctctaaagtagggacctgacgggcagtgcctaatgccattagattcactacatcgtagtaaagaactgacatgcccatggcctccgctagaaccgatagttgggaaccaatatggccgtagccaattatacctattctcaaaggtcagccgagtttccctaccgagggggtatataatacatacccaatgtcttcccacgtatttcccagcacttgttgcttactttgttccaagtgccattgtgcatctcgttagaccggtcaccgagttgccgagctagtgcaataatctcagcaataaccaactctgcaacgcttcgagagttgctgaatggagagttaaatacagcaatgccgtgttctgcagcatattggaggtctacttggtttgttccaatacaaaaacagccgacgactataagattccgagcctctttcaaaatacgagctgagagctttgtcttcgaacgtataccgatgacgtgtacatctcttgtagaacgcttagtacactataccaaagtaaggaatgtcaatgctggcttcgactcaccgaatcttttctatgagctgatcctcagggagtgatgactttaaaaactctacttgatagccttgctttgtaaggatatctcgccccgtttggtttacattttccaaaagaagaaccttgatatcttcagtagcaaatggtttcaaatgcttggcattgggcagagggatcgtgcggtttgtgaaaaccgagtttccatgactggatggggcggactgaaacgatgcgtttggagaaaggcctgaggcttgatgactgttgatttcttggggaatggctgacattgtgccaaaatagtcgagacttgaaatgaacaaggcagaatgtaccaagtggtgaaggaagggaatgtagcaaagaagggtagttgggtagttgagagtattggatatggaatggtagaagtcgttgtatttcaaatgtaatttgggagactccgggaccggaggcccactatggaatccctctgacacacacttctctttagctcttacgtctttcaaaaaaaaaaaaaaaattggcttcttctctctctctctctctcttcttcttcttttttttttttttttttttctttttttttctctttttgactcatgggtgtagtggaccgctaacatggaggggtaatggcgggactgacccaaaccccactatgaagtgattgatgtaaatttatttctcttccactccttctcagccttttcatgcaccaccatagggtataatcctattctcatctacttgatacatacaactattaagaggtattacacctaataatttctgttatagattgaaatcttatatagttaattctattaccatttgaggcgaaagaaactcatagagactgcctgcactctataaatactctacatgctagcatgttctcgtctcacaacaccgtgtaatgagattcgcaattgccgccgttgctgcagatatcattccacataaagcagtaatttctcagcgcctttggcactcacacccgtaaatcctggatcttccttgtggcttcttccgcaccacttgctgccttagagctctgcttgcccttggctttctgagaagtgctatccttcgggagttccttagtataagggagaaactctggggcacctgggatgtatttccgaaggggctctggcacaataaatccctgtcctatgtcagctatgtttttcaagaatgagtcaatttcaaaaaagcacgtacatcctccttttgataattctcaagaatacagcaaagcgtccgctcagtagcacacagggtggcattcaaagcatgaacatacgacttcttgacatctgttgctttcttagtaccataccgaatttccaaagcccgggcttgataatctgtgcagttagagcaagaaaccagctccttgtactctccttgaaatgggaaccaagcttcaaggtcgtatttcttagacgccgcattgtttaaggctccagacacgatggtaactatttgatagggaagtccaagagatttgtagaactcttccgaagtagccatcatctcctcaaaagcttcccatgattgttcaggtttggtaaggacgaattgctcgatctatgccccaatgagaaaaagaacatcggctcgtaatgtgatatttcttactttctcaaattgatggacgcggaaaatgccccaagcgtctttaccatgagctcctgcttctttgcggtagcacgtgctatatccagcatacctgtctcttagttagcttaattattaaaatatattcaccccactcacttgattgggagatccttgtcctggagccattcaccatcatgcaaagccgacaacggttgttctgaagtggcgatgaggtatttgtctgtagacttgtcctcactttctgttaccttatataattcctcgtcaaattgctcaagctgggctgtttttgccatcatgtccttcaacatgaattgaggcggctggttcggcttgtaaccctttccccaaaggaattccaggccgtagttgattagcgcaagattcaagaaaagcccataaccagtcaagcagtatccacggtggccgacaatcttaacaccacgttcggggtcgtagccgtcaaggcgagtgagaacttcatgatgagaaaggcaatcgcgcttctcgacagtgacattctcgggtacccatgtcttaaccactacattatcgtccttatggtgcatgtcagctcctttcccaaacgaatattttggtgagcgatagacacctacttcgttattgctcacagggaccgagtcatgcacataattaccaattgttcgaagtttgctgtctctttgcttttccttttgaagagctaggtcttcggcatctttcttgcgttgttcaagcgcagctttctcttcaagaagggaacttgcatcttccttgttctgtttggggcataacaattagtgtggattcgatagcagaaggttggaagaaagaacaaaaatacttatagccatgggtaagacagaccttttttttctttccaatttctttttgaagtccgttgagctgagagcctatctgcatgacctcgtaccgtgctgcagcgtgtttcagtctgttaaccttcttcggcgaggtaatgaaatctttgaaaaacgtacctcggcgggcttcctcatatagtgtaagaatttcatcgacgacactctctggagcgaatcgtttccgctgactctccttgaccttgtttgggtttccaccacggtcactgacgaaatcagcgatatcaagcatcttgtaggaaccgaaggtggaaatgtaaagcagccctagcagactaggctctcagattctaacaatgtggagtgaagttgaacaggagccccagaggttcttcacggtcaatgtgaggggtaaaaacttgggtgcctcgagacattagggcataaactatgcatgaaagtagtttaactcacatgaggggcagtggcttaatgattaatcagcagaattgactaaactactagtaggacacctaagcctggtctggtatagtccgccattaaacacctacatagtatggagtaaattttcacttttgatacctcactgtgttcttgcaaccctcatcacaagttattactagtgtatataaaggtttgcgaagtcctcagtggcggttgcatacgaaaagcaaagatccccaggcctacacagtatctttccataatggtttatgaaagtacttatgtttagtgtctttggtacccattatcggtcgcaggggaatgccaacgccagtgcaaatatgaatgagaaattggtctaagactctaaggtttagatatcttgcttgccatgatatggaaccagttagtttttgtggtgggtcagctctaccatccctattcttagctatgccagcgagcagcttctgttgctaatacggcaagccgcaaagttccttcacccagggtgggagaaagcgggtgaatctttcgataaatttttataagaaaacatatagtaagtacatgccgacttcatccataacaatctcgagcccgtacttctctattctattagtcgccatatacttagcttgaaacatccattatctccaaagccatagctattaagaaagacgatgagactgaggaacgccgcaaaagtaatagaagatgaaatggagagagtgattgtagaaggagaaggagacggatggggggagcgtcggggtagaaagaagggcaatgattgaaaacagaacaaacttcaatctgttcaatggcaggtgtactccgcatggggctttagaaaacaactttcttcatcacaccattgcaaaaatactccgcccgcgagcatatagtgaacgcatgcgactttccttcgttgtctagcagcaactaacagtcagcggaagcattttgggttctgtgcttattcacgttgcttctgtttccgtatcacattacaacacacttgtttcctcctgtgggctgcgacggattctgggacttctcgatctcccctatcattaaatcaaaagctttctcaacattgtaaccaagacgagcgctagcctcggtaaaagcacaatggaagtcttctcctaagccccggccttcgtccaatgatacttgacgttgttcggatttcaaatcacttttgtttccgacgagcacaaggggcacataatccgctccctatcgtctgatctcagtttctaaagtagacaaaggaacggcgtcgggtgcccagcactcacaaggtgatttagtatcttgtctcgaatgaccctcaccatatcgaaagactggcgggacgccaccgaatagacaatgatatacccatgaatcccaataaaatgcttagagttcaagatactgtattcatcctgactcagcattagcttctagaaggacacttcgctaccattatccttacttgaccagctgtgtcaacaatctccgttgcaaaatcttggccgttgtacttgatgattcgactaaacgtgttctcgatagtcgggtaataactttctacaaaatgatgctcaacaaatcgaactgtaagagaagatttacctatacgttctgtcagtgaccaagactctgcacagataacagctagttcagcacgaaagcggaggtcctcatcgtatacatacccacagaccgactaccaacgatagctatctttcgctgctttggtgcagtaggcatttccacagctataaatgatctgcggaacgataattcgctaggataatgtaattcgctaatggaagaaatatgtatcccgctaccaaagattgcgtgtcctgatagccacggagaaaggggcgtcagaataaggtctcaaccagtactccgtaacacgaaagcaccgatagcagggagctctccgagataggatttgagtgggaagcaaaaccaacgaacttcgacttagaggcggtgtttgatggtgagcgatcgagttgtcgtgcgagtggcaaatcagttgaagtatgagtctcagaactgactggatacctgaggtagtagtagttccagccattgaaaacgcaaacaagtcaaacggttaagattttacttattatgtcatacatcatatctacaaagtatggctactcagtcctttttttaaaccaggtaagtagtaatcgaacaccttaagtaccaattaccgtgtccaaattggtcgttaacttgagaatccgtccccaaactagttttacatcaattttttccttacatgacctgctgttgtcaagtataggtaaagagattttccattgcaaggcggaagacatagcccaagacgggggcgaaagtatgaaatggtaataaaaaatgtagttgtactctaacagcgtgacattctgcagacgttgcccagattattgtcgttcctcctctcgtatctggcaaataattcgctctaatcttggtgtaagttcggctccatctccgtgtcgtgtctcgaacaatcgcgaatctttctcaaccttttgataatatcgtatgaactcctgagccgttgatagcgcagctgcaagtcccttgccgtctagggaaactttgacctgggccaatgccatgtgattcaaacaaagtgtgactagaagaattgacaagtacccgatagcaacattatgctgcacttcggggacggagtgtgcctaaatcctgcattaggcactaaaagtgaatgtacacagtactgccttacctggggcgcagaacttatgctggtagaaaattgttgtaggagcaaatccaagaaagattcggaattatttgttgactccagaaaaatagctctcgacgattcacttttctctgcaagattaataagagcacccaaagctaatattaccgcatccagtgagctatattctttaccagtattttcttcaggcacagcgcagaattccgaaatgatgaccttgacaagtccgccaacaatttcagttctggaacactcctcacaaagagatgagtccttgttggtaaggttcaatagtacccgaatgtatagaatcagaatccgccggctttgatcggactggttcggatagagaaatttatgacactgagtaagcgagcgtaaggaattgcagcagtcgggatccaatgggcccgttaggattgtgtaattttccagaatcgacaaagccaggacgagcgtctgataacgttcaaaaggcagagggaattttgcattctcacaagctgcgggtgataataactcaataatgagggttaaaagcgatgcagggatattgacactggtgcccttctcttgatatacagttagagaagattgaagattcacaagaatctgcaaacgcggtgaaatagttgatattggctgctctccgtatatcgcaagggataaacgtggtagaagactctttaatgatgcttggacagcttttgataggccgatagatcgctgtttcgcggtaactaatatatcgtcttggacgtcaagtagagtgggggctttatccaaaagtttggaccacatgggtgttgggagtatagacgagaaagagctgctgagacatatcaatctataagcgcatagagcaagggtaattgaaactatatcaaagccaccgcctgtcatgcactttacgagtcgttcgtcaaacccggcttcggaaaaacggtctaagaatcgaggctccataagtttagtacacagttgaacaaaaccattgcacacgtccgaagcggaattgtgagggtcctcgatatcctcgaagatcgaatccactgtttcccaaaagcgtgcattgtctccagcctgtctgagctcgtgaatgcttcgaactggcctgttgtcgaggttttcctcgtcttcaacatgcaaataggtttgagataggagtcctaaacttggctgtggctgcctaaggttacgacatgtcggcgaaactaatagtccaggttctccagtgtggcccaagacataagcatcatttaggaaggaacgctggtgtgcataagtaaccctaggtcgtccagatgttaatggtctggaatcagtcgactgttggatattgtctgtaccagaacccttagaccgatgcatatacgcagtacgctgtccatcggttcctttccggatatggctagaggaggtttggcagtcgggctgacattcacgatctgacagacgatctactgacacctcttctgttgtgtttaatgaatcaactaatctctttcgggggattggttgatcggtttggtgtctggttgcattcatgccgctgggatatgatgtagaaagcctgtcggtctcgagagaaaacattttatcccgtgacgattgaagcatataggtcatttctgtaggagtttgttcatgtttgtcggaatcagcctgggcttccgttagaaggctacaagcatcactttggcctcgagctttggccatatggagagcttcattggccctgacacaattggaacttccagtttcaccaaacatcgtggaactttcatgcgcaaatatagacccaacatgactaccagcactagcgctaggctcctgagtttgctgcgccttttcctgatggagctttctgcgctttgttccggtgccatcataggctttcccatgtctattctgggaacttgatatgtgcgtatcaggaatatgatcaagcgagtcaacgccacagagttgcttagaatcactgcttggtgatcgagtcaaggtacttgaacagggacaagtgtttgagccttcagcctcactagagataataggggccgttgaagcctcttttaccctgttcttgagattgtgagacttcctagagcttggtttaccgtaagtcacaagtctcttaactttctcgcgcatgtttcaaacgccacttttatagtcaaggccggtatgtatgagctcttgtgtgaattgatgaaaagggttcgggcggattgcgagaacacagtatatgagaggtaagaatgccggtgccgagttgttagaagccttcaattacaatatgtaaagatagatattgggatgagctcttcaaagaaactactacacattcgtggatgtgagtgcttcatggaggtgtaggtagtaataaattggtagggttgtgaaccagtgaccaaggttgcaaccaacgaaactgttgtaaaagaactccacggcctgacttgatacttagttgaactctctgggtgtgagtatggctggtgaagcaatatcaactatatatcctcatctcgtgcattatagctggctttaaggcaacattggcgtaaatcaagtttgccgaagttctctagacttattctcttcctttaagagcgggcagtgcggagtcgcggactacactacacaatattgggtttaaattcaactggactaagtcttatgctaggttatgttctatgaactaatcttgttgttacattagaaacaccacccatctaggccgccataacttgtttcctttgctggttttatgttgtacttcgtagtccaattagaaaaccaccccgcccgccagccatgattagtccaggctacttatcgtacatattcatgcacagtctgtacctgcttgatctctctcttttccttgctacaacttcattacatagtgcttccacgcgagattagtagaccctcagtgggaccactagccttttttttccgtccttcacacccccatccatttattaagaattataccaaagttttcaatgaccatggctgatgaacgattggaagcgatcccttctcctgcccaaggagttggcccaatttacagacccgatggcgagaagccaacagcgacagtgtcgaaagacataccttatgaaaatgtccatgtcttgcctcaaacaccccagttgatcgctcttctaacgcaagtcatacgtctctaaagaattttcaagtcaacatcgggtgcccctactgacaactccatagtatgatcagagataagagaactggacgtgccgatttcatattctattccaacagaatcatccgtttattggtggaagagggtttaaaccaccttccagtggttgagcaagcggtgacaactcctgtaggccgtacctatctcggtgtcaagttcgaaggtaaaatatgcggcgtatccatcatgagagcaggcgaggcgatggagcagggcttgagagattgctgtcgatcagttcgcattgggaaaatacttatacagagagatgaggaaacatgcaagccgaagcttttctacgagaagctccctgctgatatctccagtcgatgggttttactccttgatccaatgttcgcaactggtgggttatataaccttcttacactatagagtgatattgattgctatcgatccagggggttcggcgacgctcgctgtcgaaattctgaaggcgaagggtgtaccagaggaccgtattctattcctcaaccttatcgcaagcccttcaggagttgcagactttgcggaacgcttccctaagctcagggtcgtaactgcttttattgaccaaggcttggatgagaaaaagttgatctacttctatttctccctcttcttgattagcccgctaactggttgctatcacacaggtacattatccctggacttggtgattttggtgatcgatactatacgctgtgacacccaatcaccgaagtgaggtcctagtttagtattgcttatgaagtattacggagttttccttgaaattggcttgccgcatatatgcataaaaacaatacaacgtagtcgtatcgcacatattacacgaagattttaactggagttactagtttatgaggcataggtgaccacgatattcataccacaatgataccattgcaagtatccaatatccctaggatcgaagccagctaatcgccaagattatcgagtaacagcgagtccgaaaaagcaaaacagcggtcataacttagaaacagtgaccacaggaaagctactggacctttatattgtacgccaacaaccaatatctgagaattacttgtatcaatcgtcatccacatatgcacccgcacggtctgcatcatcgtactcagcatcttgtccactagaagacacagtatactcatttgatcgcagaccgccggcattagtatcttcgtatctgttggcagtatccttggccactgcatcacaagcatctacccaatccgaatatacatcgacagcagcagaaagatctaggggatgaatttgtcagaactcgtcctaagagtagtacgtttatgaactcacaattaataccggtttgaaacctctgtccacacaccttacaggacaaatttcctagccccagcttcttgtctagtttcaccacaatagaattttcgtggttacagaaaagacatgcgaaagttgtaggcaatggttctctctgactccattcttagcctcaataatcatcgcccgttccaggactactcaccttctttggcccttgtggttgtctgcttgacttcttgcgcttgccctgtcaccgaaccaagaatcaatcattggaccatgatatttctttttctgtttcctttcctttcctacatgtcccggatgcgcatcagagggcagcctaccatgcttctttcgacgttcgcgggtgcttaaagctagttttcagtgtaggacaactaagatatccctgatctagttagctgcagcgtgtatagttcagttatatacttactattttcctggttgatatcaatgcgtatccccacaaaaacagggtacagtggaatgaatactgtggcttagagacctggggtgatattctgtacggagttatagcacagataaggaaatgaagactatgtatgttatggggacactttccagcactccggccctgtaatgccgattacatcactcgcgtccacactgacattagaacaattggacggctataacggtgtactaataggtaaacaacatctacacctaagttcccacgttgctcttgagtattatctaagccaagaacttcttccatacaaaacatacctatacttatcatacatgctggtatagaaaggcatgtgtaggaatacgactagatacttcagcacacaccatcactccgtacctcactcatatcagcctacaatcgccgtactcgaataaagatcttcattgtcatatgcttaattagagattcacgcgaatgggaggatctagtattacaatacctttaccccctagaagataggaaaacgcgaaaaccatgtatagaggatattataaccttgcatacttattatgatcaggatttaagatacatagacgtatgttcacgtgactcgtgtaacaaaatgtccaatcatagtgtctggatggtgaatttgtgggggggtaatattatataatctgggatagggccgacgctctcgcttagccgacttttctgtgggatttcgatttcaactctcattccgccgacccagcagcgtcaatcccatcgactccctccaccagaccgcgtggtgtgatatatttgtctgtcttcgaccactgcaagatagacctgagtcgcagctatggctgttggaaagtatgccaaatctcatgctgacatcacaatgcgggacagcgatcttggttgctaatgtcttccaggaacaagcgcttgtcgaagggcaagaagggtatcaagaagaggaccgttgatcctttctctaggaaggatgagtactctgtgaaggtattcacaattaatctagttgcgcgaatgttgctaacagtgttcaggcaccgtccactttccagatcagagagtaggtttcttctatataaattgcaagcccttctttgagagaagaaccgaaacatgtgtatgggcgaacggctgacaagaagcacaaaagtgtgggaaagactttggtgaaccgcaccagtggtctcaagaatgcgaatgactcgctcaagggccggattttcgaggtttcccttgccgacttgcagaacgacgaagaccacgctttccgtaaggtcaagcttcgtgtggacgagatccaaggaaagaactgtttgaccaacttccacggcctcgacttcactactgataaactgcgatccctggtccgcaagtggcagtcgctcatcgaagccaacgtcaccgtgaagacgaccgacgactacctccttcgtctgtttgccatcgctttcaccaagaggcgtcccaaccagatcaagaagaccacatacgcccgctcctctcaaatccgtgccattcggaagaagatgaccgagatcatgcaacgggaggccgccagttgcaccctctcccaactcaccacgaagcttatccctgaggttatcggccgcgagattgagaaggcgacgcaaggaatctatcctcttcagaatgttagttgtgtctcctatcctccggtttgaatcggaaactaagatgctcctaggtccatatccgcaaggtcaagcttcttaaggcccctaagtttgatttgggcgctttgctgaacctacatggcgaatctaccaccgatgacaagggtcacaaggttgagagggaattcaaggagcaggttcttgagagcgtctagaccttccgttgctcactgtggaagtaaatgcagaatcctctctagaatcaaaactgtcgctgcctctcgatcgaagataaaaggaggagggggaatattccaacttttgtctccgatcaacgacaacgaaggtcgttcatgtataaggtaggcggtgtcggtaatgcaaaaagactatgaattgatttcgttacgtgaatgcaaacaaaatagaactggctcagttgttgcatctttcacctgatctaggtgtcaaatgctgtagttcgatagtgtgggcgctactttatctatgtgtaccccttacaggaaagttgtctcactccaacaggactgtcattcaacatcgtctttgtcggggcatgttcacctagtcactgccagtatctatgacttgctcatcgagctttatgtttttaggtggttacttgcaacatagacaccttaaataaattccacttctagtacctattaaagttcagctgtatgcttaggctggtgagcttagaacaacttgggaagcttgtagtaaactaagagacggatataaggatgccactgaggttgaaaacgattcgaatagttgcaggacctatatattactaaactgtcattgatgaacatgtgggtatggtgaaattctgtcttgggagggtgaggcttaaatgacccagctaaaggacttgatattcaatattaaaaagagtccataactatatcattgtaagaggatctaaccgcaccctacactggttccagggttataacataattggtaagtgagtggccactggaacataaccagtaagcgagctgcacatgtaagcaggctgcacacccaacatgttttccatgccttaatttcttagacaatttttaaattaatattaattaaagctttagtttttattataataaaatagatttttaaaattaaaattgataaaattaattatattataatattcaaatatcatataattattaattattaatttttaaatattaagattattttaaatatatatataggggctttatccttccacagggcagtgcctaggtagacagggcacctaatctaattaggtttagggcttatataatcgattcatttcactggcagaatctaatcttagaatatagtaatatctgagttttaaaaagtatattttttaataggatatttaatagaaaggtaattaagttacttacttaatctaaattaaaaataaataatttaattaattttataaatatttagattagttaaaagatactaaaatttctatagaatactggtataatatatctaaatttagagatatttatatctaaatttaaagatatttacatctaagctcagaaatactagtatttattagaagggctaagacaacagctaataaaaatatatatagagatcactagatatactttaaagattctatatatttatataatttagatatattatactagaaatatatctataattattactaaattttataattaatagtatatatctatagtatctttaggtcttagcttaaagaaattaggttagaaattgttagttatatatacgcaaaaaaggtctagaagatctagaaattagaagttcttagtatttaaatatactaaggtttttaataaggcctttaatactatagtctatagccaaggctttaaaatctctaaaacttctaaaactgcggccacagctataaatcttaatataattctacctaacatgtctgaaatgcttaaaatgcttaaattacttgatctgcctactaatctatctactaatctgcctgacctgcctgacctgcctaccaatatgcctcggtggttgaatcactagtgtcacggtgcgatcccggatcgctgttctgctagccctgactgcctgttatataatcctctaactatatatctgtctatttaatcctaatcctattatagctctttaagctatatcttatctatctatctatatatagtctaatttatagtctatatatatgttagctttaattagtctatttattaaagttatattttaatattatatagctctattttatagagctagtatatttaaaaaaatatttattatatcttagttactatttttatttactaatttaaataattctataatctatatattctaggataatattaattaatttagttattataaataaatagatagatatattattatatttaaaataaaatcttaaaatattaaaaacattatttgaaaaaaaagaaaatatctttaaattattttaaaatataaaaaaactattttaataactatttttatagttaatatatttatctagatttttagatctattactaaaaaatttataacttttttaataaaaatatttttattaattaatttattatttattatttttatttatttttttaaatatttatttaattttaataaatttaaaaaaaaattattagaatctctattattttattttataaattaaaaaaataa

SEQ ID NO: 73 - DNA, 5700 bp, Aspergillus terreus
atgtccggttatccacaaggccactacgatgatggctacggccatcaggccgccccccatggagactcctactaccaggatgaccatggtcaggcctattatgacaatcatgattacggcgacggttattatgatagaggtggctactacgatggtggtgctggcgcgtatcacggcggtgatgccgggtactatgatgccggtcaccacgacgagtactatggcgaccaatactacgaccaaggcggcgcccaaggctacggcagaagacgccggggcgattctgaagaggactcggaaaccttcagcgatttcaccatgaggtccgaaaccgctcgtgccgccgatatggactactatggccgtggcgatgaacgctacaacagctatgccgatagccagtatggccgcggctatggctaccgtcccccctcctcgcagatctcttacggcgccaaccggtcgtctggtgcctcgacccccgtctatggcatggactacgggaatgccctccctgctggccagcgatcccgtgagccctatcccgcctggccctctgacggacaggttcccgtctccaaggaagagatcgaagacatcttcctagacttggtgaacaagttcggtttccagcgagacagcatgcgcaacatgtacgaccatctcttgacccagctcgactcgcgtgcttcccgcatgactccgaaccaggccctcctgtctcttcatgcggactatatcggcggtgacaacgccaactaccgccgctggtactttgccgcccatctcgacctggacgatgccgtcggatttgccaacatgaagctcggaaaggccgatcggaagaccagaaaggcccgcaaggccgccaagaagaaggctcaggagaaccccgagaacgtcgaagagaccctggaagctctcgagggtgacaacagcctcgaggctgcggaataccggtggaagacgaggatgaaccgcatgtcccaacacgaccgggtgcgtcaggtcgccctctacctgctctgttggggtgaagccaaccaggtccggttcctgccggagtgtctctgcttcatcttcaagtgcgcagacgactattacaactcgcccgagtgccagaaccgcgtggaaccggtcgaagagtttacttatctgaacgaggtgattactcctctctaccaattctgccgtgaccagggttacgagatcatggatggcaaatacgtccgccgtgaacgcgaccacaaccagatcatcggttacgatgatatgaaccaactcttctggtaccccgaaggtatcgaacgcattcagttggaagacaagacccgcctcgtcgatatcccggcggccgagagatggaccaagctgaaggaggtgaactggaagaaggcgttcttcaagacttacaaggagacgcgttcctggttccacatgattaccaacttcaaccgtatctgggttattcacttgggtgccttctggttcttcacggcctacaacgctcccactctgtacaccaaggattacaagcagcaagtcaacaataagccgccgggtgcctattactggtcggcggtcggctttggtggtgcccttgtctcattcatccagattctggccaccctggcggaatggctgtatgtcccgagacggtgggcaggtgctcagcaccttaccaagcggttaatgttcctcctcgcagtcttcgttgtcaacttggcccctggtgtggtcgtgtttggattttccagcagcatgaataagacgattcctctggtcattggtattgtccacttcttcatcgctctggcaaccttcttcttcttcgccgtcatgcctctgggcggtttgttcggcagctacttgaagaagcatggtcgtcaatacgtcgccagtcagactttcactgccagcttcccgcgtctggtgggcaacgatatgtggatgtcctacggtctctgggtctgtgtctttggtgccaagctggccgaatcctacttcttcctgactctgtccttcaaagaccctatccggattctgtctcccatgaagatccggcagtgtgctggtgtgacctacatccccaaccagttgtgtcacgcccagccccagatcctcctgggtctcatgttcttcatggacttgacactgttcttcctggatagttacctgtggtacattatctgtaacacggtcttctcggtggcgagatctttctaccttggtgtgtccatctggtcgccctggaggaatatcttctcccgtctccccaagcgtatctactccaaggtccttgccaccaccgacatggaaatcaagtataagcccaaagtcttgatttcccaggtctggaacgcggtcattatctctatgtaccgtgagcacctcctggccatcgaccacgtgcagaagctcctctaccatcaggtcccgtccgagcaggaaggaaagcgtacattgcgtgcccctaccttcttcgtttcccaggaagaccagtctttcaagaccgagttcttcccccccggtagtgaggcggaacgtcgtatctctttctttgctcagtcgctctccactcccatgcctgaacccctgccagtcgacaacatgcccaccttcactgtcctgatcccccactacagcgaaaagatcctgctctcgctccgtgaaattattcgcgaagacgagccttactcgcgcgtcactctgttggagtacctcaagcagctacacccgcacgagtgggattgcttcgtcaaggacactaagattctggcagatgaaacgtcccagttcaacggcgaatatgagaagagcgagaaggatgtcgccaagagcaagatcgatgatctgcccttctactgcattggtttcaagtccgctgctcccgagtataccctccgtaccagaatctggtcctccctgcgctcgcagactctgtaccgtacggtctccggtttcatgaactacagccgtgccatcaagcttctgtatcgtgtggagaaccctgaggttgtccaaatgttcggtgggaactcggagaaattggagcgggaattggagagaatggctcgccgcaagttcaagatctgtgtgtccatgcaacgttatgccaaattcaacaaggaagagcgggagaacaccgagttcctcctgcgcgcctacccagaccttcagattgcctacctggatgaggaaccccctgtcaacgagggtgaggaaccccgtctgtactctgctttgatcgatggacactgcgagcttctcgagaacggaatgcgcaagcccaagttccggattcagctctctggtaaccccatcttgggtgacggcaagtctgacaaccagaaccacgctatcattttctaccgcggtgaatacatccaagttatcgacgccaaccaggacaactacctggaagagtgcctgaagatccgcagcgtcctggctgagttcgaggaactgaccacggataacgtctctccttacactcccggtattccttctgacaacaccactcccgttgccattctcggtgctcgtgaatacattttctccgaaaatgtcggcgtgcttggtgacgttgctgccggtaaagaacagacgttcggtactttgtttgctcgtacgcttgcgcagatcggcggaaagctgcattatggtcaccctgatttcctcaatggtattttcatgacgaccagaggtggtatctccaaagcgcagaagggtttgcatctgaacgaagatatctacgctggtatgactgctctgtgccgtggtggtcgcatcaagcactgcgagtacttccagtgtggtaagggtcgtgatcttggttttggttctattctgaacttcaccaccaagattggaaccggtatgggtgagcagatgctgtccagagagtactattacctcggtacccagcttcccctcgatcgcttcttgtcgttctactatgctcaccctggattccacatcaacaacatgttcattatgctttcggtgcaaatgttcatgattgtcctcgttaacctgggtgccctgaagcatgagaccatcatctgccgttacaactcggatcttcccattactgatcccctgcgtccgactggctgtgccaacctggtgccgatcgtggactgggtgaaccgctgtgtcatttccattttcatcgtgttcttcatctcgttcgtgcctctggctgtccaggaactcacggaaagaggtgtgtggcgtatggctactcgtctcgccaagcactttggctctgtctccttcatgttcgaggtgtttgtgtgccagatttacgccaatgctgtgcaccagaacctttcattcggtggtgctcgctacatcggtaccggacgtggtttcgctaccgctcgcattccgttcggtgtgttgtactcgcgtttcgcgggcccttcgatctatgccggcgcccggtccctgatgatgcttctgttctcgacttccaccgtctggaccgcgtcgttgatttggttctgggtgtctctgctcgccttgtgcatttcgccgttcctgttcaacccccaccaattcgcgtggaatgactttttcatcgactacagggactatctccgttggctctcgcgtggtaactcccggtcgcatgcctcctcttggatcgggttctgccgtctgtcccgtacccgcattactggttacaagcgcaagctcctcggtgttccctccgagaaaggatccggtgatgttccccgggctcgcatcacgaacatcttcttcagtgagatcattgcccctctggtgtttgtcggtgtcactcttgtgccttacctttatatcaactcccgcactggtaagaccaacgacaacagcaaggcgtcgaatgccatcattcgaattgccattgttgcctttggtccgattggtatcaatgccggtgtggcaggcgctttcttcggtatggcttgctgtatgggtccgattttcagcatgtgctgcaagaaattcggtgcggtccttgctgctatcgcacacgccatcgccgtcattgtgctgctggcgatctttgaagtgatgttcttccttgagtcctggtcttggccccggtgtgtcctcggaatgatcgccatggttgcgattcaacgcttcgtctacaagctcatcatttccctggccttgactcgtgaattcaagcatgaccagtcgaacattgcctggtggactggcaagtggtacagtatgggttggcattcgctgtctcagccgggtcgtgagttcctgtgcaagatcaccgaactgggatacttctccgccgacttcgttttgggtcaccttatcctcttcattatgcttcccgccctttgcgttccttacatggacaaattccattcggtcatgctgttctggcttcgaccaagccgtcaaatccgccctcccatttattctttgaagcaatctaagctgcgcaagagacgcgtcattcgcttcgccatcctctacttcgccatgcttgtcttgttcttggttcttctcatcgccccgctcattgcccggaacatgaacatcttgaagaactttaagagcttccccatggacctcttgcagccgcttgatgccgacaacaacgacaccactacctactacactggtgccggtctgcctgccggctttgtggctgagtcgtctgcagctgcgtctactacttcttaa

SEQ ID NO: 74 - DNA, 3096 bp, Beauveria bassiana
gaaacggctcagatgaatggcgaaccagagaagagcgaaaaggacacagcaaagagcaaaattgacgatttgcctttttactgcattggcttcaagtcctctgccccagagtatacccttcgcacacgcatctgggcatccttacgttcccagactctgtaccgcaccgtatctggttttatgaactacagtcgcgccatcaagctcctctatcgtgtcgaaaaccccgaagttgttcaaatgttcggtggaaactcggaaaaattggagagagagctagagaggatggcccgccgcaagttcaagcttgtcgtttctatgcaacgctactctaaattcaaaaaagaagaaatggaaaacgccgaatttctacttcgtgcctacccagatcttcagattgcttacttggatgaagagccccccctggctgagggcgaagagcctcgcctatactcagcgttgattgacggtcattcggaaatcatggagaatggtatgaggcgcccgaagttccgcgtccagctttctggtaaccctgtgttgggtgatggtaaatctgacaaccaaaaccacgcgattatcttctaccgtggtgaatatatccaacttattgacgccaaccaagacaattatctggaagaatgcttgaagattcggagtgttctcgcagagtttgaggagatgaagccagataaccaatctccctacacccccggtgtgaagaacgacgttcacacacctgttgctattcttggtgcgcgtgaatacatcttttccgagaacatcggtattctcggtgacgtcgctgctggaaaggaacagacgttcggtaccctcttcgcccgtaccatggcccaaattggtggtaaacttcactacggtcaccctgatttcctcaatggtattttcatgacaacccgtggtggtgtatcgaaggcccagaaggggctgcatctgaacgaagatatttttgcgggtatgaatgcacttgtccgtggtggacgcattaagcactgtgaatactaccagtgtggcaagggtcgcgatcttggattcggttctattctcaacttcacaacgaagattggtactggtatgggagagcagtggctctctcgagaatactattacctcggcactcagcttcctctcgacagattcctgtccttttactacgcacacgcaggcttccacgtcaacaacatgttcattatgctgtctgttcagtcattcatgctcacgctgatgtcaatcggggctcttcgacatgaaacgatccgctgcgactacaacccgcagaaaccgattaccgatccgctgtatcccacgaaatgtgccaacacagatgagttgatgggctggatctatcgttgcatcatttccatcttcttcgttttcttcatctcctttgtgccgctcattgttcaagagttgacagagcgaggtgtatggcgtgctgccctgcgttttatcaagcagttctgctccctgtcaccgttcttcgaagtgtttgtctgtcaaatctatgccaactcagtccaagcggatctggcatttggcggtgctcgatacattggcactggtcgcggcttcgcaacagcccgcattccctttggcgttttgtattcgcgttttgctggacagtcgatctactttggtgctaggttgctgatgatgcttctatttgctactgccactgcatggcaacctgctctcacctacttctggattgttctgctcgggctcatcatctcaccattcttgtacaaccctcatcaatttgcctggactgatttcttcatcgattatcgcgactttcttcgatggctgtcgcgtggcaactcacgctcacacgcttcctcctggatcacattctgcagactttcccgcacgcgtatcactggctacaagcgcaaagttatgggcgatgcctcggcgaagatgtcggctgatgtccctcgtgctgctgtggccaacatattcttgactgagatcctcacgccgctactgcttgctgctaccacaactgtcgcctacctattcatcaatgcgcagactggtgttacagataatgacaccaattcaggcgtatcgcctagattcccaatcgggcctactggctcattgatccggttggcaatcgtggctttcgcccccataggcatcaacgccggcgttcttgccgccatgtttggtatggcttgctgtatgggaccagtattgaacatgtgttgcaaaaagttcggtcctgttcttgctggtatcgcccacggtgcggctgcagtcttcatgattcttttttttgaagtcatgtatgttctagaaggcttcaacttttctagggcacttgctggcattatcgcggccacctgtatccagcgatttgttttcaaactgattgtgtcacttgcattgaccagggaattcaaaactgaccagtccaacgtcgctttttggaacggaaaatggtactcaatgggttggcactcagtatcacaaccagctcgagagtttctttgcaaaattacggaactcagcatgttctctgctgatttcattctgggacattggatccttttcatgatggctccacttgtcttaactcctcaaatcgataagatacactccatgatgctcttctggttgctgcctagtcgtcagattcgtccgccgatctactccatgaagcagtcaaagctccgccgcaggcgtgtaattcgatttgccattctttactttattctcttcgtcatctttctggcactcgttgttgcccctggtgtaatcggcaagaaagtactcggtgatatgattttcaatgccctaggcggcggtggttcaaacggcatcggcggcatgcgcctcctgcagccatggggactggacaacaacaatactgaaggaaggactgaaactggcacaaaggccggtggtggtgatgcggctgcgacatctacggacgaagcctcgaagctgcgcttattttaaagccgcgcgcgttccaaaagcagatgttttgggtcactacaaattactgtactgattattagattgttacccttgtttgtgccatcattttgatcattctatctcgcc

SEQ ID NO: 75 - DNA, 1152 bp, Botryotinia fuckeliana
atgattcctcattacggagagaagatcttgttctcactgcgtgaaattattcgtgaagacgaaccatactcgcgtgttactatgcttgagtacttgaagcaactgcaccctcacgagtgggactgcttcgttaaggatactaaaattctcgcagacgagacctctcaattcaacggcgattacgataaggatgaaaagaacactgctaagagtaaaattgatgatcttccattctacttcattggtttcaagtcggccgctcccgagtacactctccgcacacgtatctgggcctctttgagagcacaaactctttaccgtacaatctctggtttcatgaactatagtcgtgctatcaagcttctctaccgtgtcgagaaccctgaggtcgttcaaatgttcggtggtaactctgataagctcgagcgcgaacttgagcgtatggcccgtcgcaagtttaagctttgtgtttccatgcaacgttatgccaaattcaagaaagaggagatggaaaacacagagttccttctccgtgcttaccctgatcttcaaatcgcttacctggatgaagaagctcctcttgccgaaggtgaagagccacgtctctactccgctctcattgatggtcactccgaaatcatggaaaatggaatgcgcagacccaagtttcgtattcaactttctggtaacccaattttgggtgatggaaaatctgacaaccaaaaccatgccattatcttctaccgtggtgagtacattcaactcattgatgccaatcaggacaactatttggaagagtgcttgaagattcgcagcgttttggccgagtttgaggaaatgacaaccgaaaatgtctctccctacactcctggtgtttccaaccctaaggttgcacctgttgctattcttggtgctcgtgaatacattttctctgagaacattggtgttttgggagatatcgctgccggaaaggaacaaacattcggtacactcttcgcacgtactcttactgccatcggtggtaagcttcattatggacatcctgatttcctgaacggtattttcatgactaccagaggtggtgtttccaaagctcagaaaggtcttcatctcaacgaggatatttacgctgattggaactggtatgggtga

SEQ ID NO: 76 - DNA, 5694 bp, Candida albicans
atgtcgtataacgataataataatcattattacgaccctaatcaacagggcggtatgccacctcatcaaggaggagaagggtattaccaacaacagtatgatgatatgggtcaacaaccacaccaacaagattattacgatccaaatgctcaatatcaacaacaaccatatgacatggatggatatcaagaccaagccaactatggtggtcaaccaatgaatgcccagggttataatgctgacccagaagccttttctgactttagttatggcggtcaaactcctggaactcctggttatgatcaatacggtactcaatacaccccatctcaaatgagttatggtggtgatccaagatcttctggtgcttcaacaccaatttatggtggtcaaggtcaaggttacgatccaactcaattcaatatgtcatcgaacttgccatatccagcttggtctgctgatcctcaagctccaattaagattgaacacatcgaagatattttcattgatttgactaataaatttggtttccaaagagattctatgagaaacatgtttgattactttatgacattgttggactcgagatcttcccgtatgtcaccagctcaggccttgttgagtttacatgctgattatattggtggtgacaatgccaattatagaaaatggtatttttcttcacaacaagatttggatgattccttaggttttgctaatatgactttaggtaaaattggtagaaaagccagaaaggcttccaagaaatccaaaaaagctagaaaagctgctgaagaacatggtcaagatgtcgatgctcttgctaatgaattagaaggtgattattcattggaagccgctgaaatcagatggaaagccaagatgaactctttgactccagaagaaagagtaagagaccttgctctttatttgttgatatggggtgaagccaatcaagttcgttttactcctgaatgtttgtgttacatttacaaatctgccactgattatttaaattctccattgtgtcaacaaagacaagaaccagtgcctgaaggtgattatttgaaccgtgtgatcactccactttacagattcatcagatctcaagtttatgaaatttatgatggaagatttgtcaagcgtgaaaaagaccacaacaaggtcattggttatgatgatgtcaatcaattgttttggtacccagaaggtatttccagaattatttttgaagatggaaccagattggttgatatccctcaagaagaacgtttcttgaaattaggtgaagttgaatggaagaatgttttcttcaaaacttataaggaaatcagaacctggttgcattttgttaccaactttaatagaatctggattatccatggtaccatctactggatgtacactgcttacaactccccaaccttgtatactaaacattatgtccaaaccataaatcaacaaccacttgcttcgtcaagatgggctgcttgtgccattggtggtgttcttgcttcatttattcaaattcttgccacacttttcgaatggattttcgtgcctagagaatgggccggtgctcaacatttgagtcgtcgtatgctatttttggtgttaattttcttactcaatttggttccaccagtttatacattccaaattaccaaattggtgatttattcgaaatcggcatatgctgtgtcgattgttggatttttcattgctgtggccactttagtattctttgccgtcatgccattgggtggtttattcacttcatacatgaacaagagatcaagaagatatattgcatcacaaacatttactgccaactacattaaattgaaaggtttagatatgtggatgtcttatttgttatggtttttggttttccttgccaaattggttgaatcttatttcttcttgactttgcctttaagagatcctattagaaacttgtcgaccatgacaatgagatgtgttggtgaagtttggtacaaagatattgtttgtagaaaccaagccaagattgtcttggggttgatgtatcttgttgatttgttattgttctttttggatacttatatgtggtacattatttgtaactgtatcttctccattggtcgttcattctatttgggtatttccattttgactccttggagaaacattttcaccagattgccaaagagaatttattccaagattttagctaccacggaaatggaaatcaaatataaacctaaagttttgatttcacaaatttggaatgccattgttatttccatgtacagagaacatttgttagccattgatcacgttcaaaaattattgtatcatcaagttccatctgaaattgaaggcaagagaactttgagagctccaactttctttgtttctcaagacgacaacaattttgaaacggaatttttcccaagaaattctgaagctgaaagaagaatttcatttttcgctcaatctttggctacaccaatgccagaaccattaccagttgataatatgccaacttttactgttttcactcctcattattcggaaaagattttgttatctttgagagaaatcattagagaagatgatcaattctcaagagtgacattattggaatatttgaaacaattacatccagttgaatgggattgttttgttaaggacaccaagattttggctgaagaaactgctgcttatgaaaatggtgatgattctgaaaaattatctgaagatggattgaaatccaagattgatgatttaccattctattgtattggtttcaagtctgccgcccctgaatatactttaagaacaagaatttgggcttcattgagatcccaaactttgtacagaactgtatctgggtttatgaattatgccagagccattaaattgttatacagagtggaaaacccagaattggttcaatatttcggtggtgaccctgaaggattagaattagctttagaaagaatggccagaagaaagtttagatttttggtttctatgcaaagattgtctaaattcaaagatgatgaaatggaaaatgctgagttcttattgcgtgcttaccctgatttgcaaattgcttacttggatgaagaaccggctttgaatgaggacgaggaaccaagagtatactctgccttgattgatggtcattgtgaaatgttagaaaatggtagacgtcgtcctaaattcagagttcaattgtctggtaatccaattttgggtgatggtaaatctgataatcaaaatcatgcggttattttccatagaggtgaatatattcaattgattgatgctaatcaagataattatttggaagaatgtttgaagattagatcagttttggctgaatttgaagaaatgaatgttgaacatgttaatccatatgcaccaaatttgaaatctgaagataataacaccaagaaggatccagtggcatttttgggtgctagagaatatattttctcagaaaattctggtgttttgggtgatgttgctgctggtaaagaacaaacttttggtacattgtttgcaagaactttggcacaaattggaggtaaattgcattatggtcatccggattttttgaatgctacatttatgttaactagaggtggtgtttctaaagcacaaaagggtttacatttgaatgaagatatttatgctggtatgaatgccatgatgagaggtggtaaaatcaagcattgtgaatattatcaatgtggtaaaggtagagatttaggttttggatccattttgaatttcaccaccaagattggtgctggtatgggagaacaaatgctttcaagagaatatttctatttgggtactcaacttccattggatagatttttgtcattttactatggtcatccaggtttccatattaataacttgtttattcaattgtctttacaagtgtttattttggtgttggctaacttgaattcattagctcatgaagctatcatgtgttcttacaacaaagatgtcccagttactgatgttttgtatccatttggttgttacaatattgctcctgccgttgattggattagacgttatactttgtctattttcattgttttcttcatttctttcattccattggttgtacaagaattgattgaaagaggggtatggaaagcgttccaaagatttgttagacattttatttccatgtcaccatttttcgaagttttcgttgcccaaatttattcatcatcggttttcactgatttgaccgttggtggtgctagatatatttccactggtagaggttttgccacttcaagaattccattttcaatcttgtattcacgttttgctgattcatccatttatatgggagcaagattgatgttgattttattgtttggtacggtttctcattggcaagcaccattattatggttctgggcttcattatcggctttaatgttctccccattcattttcaatcctcatcaatttgcttgggaagactttttccttgattacagagatttcattagatggttatctagaggtaacactaaatggcacagaaactcatggattggttatgttagactttctagatcacgtatcactggtttcaaacgtaagttgactggtgatgtttctgaaaaagctgctggtgatgcttcaagagctcatagatccaatgttttgtttgctgatttcttaccaacattgatttatactgctggtctttatgttgcttatacttttattaatgctcaaactggggttactagttatccatatgaaatcaatggatctactgatccacaaccagttaattctactttgagacttattatttgtgctttagctccagttgttattgatatgggatgtttaggtgtttgtcttgccatggcatgttgtgctggtccaatgttaggattatgttgtaaaaagactggtgctgttattgctggtgttgcccatggtgttgccgtcattgttcatattattttctttattgttatgtgggtcactgaaggtttcaattttgccagattaatgttgggtattgccaccatgatttatgttcaaagattattattcaagtttttgacattatgtttcttgactagagaatttaagaatgataaagccaatactgctttctggactggtaaatggtataatactggtatgggatggatggcttttactcaaccatctcgtgaatttgttgctaaaatcattgaaatgtcggaatttgctggtgatttcgttttggcacatattattttattctgtcaattaccatttttgtttattccattagttgatagatggcattcaatgatgttattctggttgaaaccatcaagattaattagaccaccaatttattctttgaaacaagccagattaagaaagagaatggtgagaaaatattgtgttttatattttgccgtgttgatattatttattgtcattattgttgcaccagcagttgcttcgggacaaattgctgttgatcaatttgccaatattggtggatctggttctattgctgatggattattccaaccaagaaatgtcagtaataatgatactggtaatcatagaccaaaaacctacacttggagttatttgagtactcgttttactggaagtaccaccccttattctacaaatccattcagagtttaa

SEQ ID NO: 77 - DNA, 5694 bp, Candida dubliniensis
atgtcgtataacgataataacaatcattattacgaccctaatcaacagggcggtatgccacctcatcaaggaggagaagggtattaccaacaacagtatgatgacatgggtcaacaaccacaccaacaagattattacgatccaaatgctcaatatcaacaacaaccatatgacatggatggatatcaagatcaagctaattatggtggtcaaccaatgaatgcccagggttataatgctgacccagaagccttttctgactttagttatggtggtcaaactcctggcactcctggttacgatcaatatggtactcaatacaccccatctcaaatgagttatggtggtgacccaagatcttctggtgcctccacaccaatttatggcggtcaaggtcaaggttatgacccaactcaatttaatatgtcctccaacttgccatatccagcttggtctgctgatcctcaagctccaatcaagattgaacacattgaagatattttcattgacttggctaataaatttggtttccaaagagattctatgagaaacatgtttgattattttatgacattgttggactcaagatcttctcgtatgtcaccagctcaagctttgttaagtttacatgctgattatattggtggtgacaatgccaattataggaaatggtttttttcttcacaacaagatttggatgattctttaggttttgctaatatgactttaggtaaaattggtagaaaagctagaaaagcttccaagaaatccaaaaaggctagaaaagctgctgaagaacatggtcaagatgttgatgctcttgctaatgaattagaaggtgactattcattggaagctgctgaaatcagatggaaagccaagatgaattctttgactccagaagaaagagtgagagatcttgctctttatttgttgatatggggtgaagcaaatcaagttcgttttactcctgaatgtttgtgttacatttacaaagccgccactgattatttgaattccccattatgtcaacaaagacaagaaccagtgcttgaaggtgattacttgaaccgtgtcattactccactttacagatttattagatctcaagtttatgaaatttatgatggaagatttgttaaacgtgaaaaagaccacaacaaggtcattggttatgatgatgtcaatcaattgttttggtatccagaaggtatttccagaattatttttgaagatggaactagattggttgatatcccacaagaagaacgtttcttgaaattaggtgaagttgaatggaaaaatgttttctttaaaacttataaagaaatcagaacttggttacattttgttaccaactttaatagaatctggattatccatggtaccatctattggatgtatactgcctacaattccccaactttatatactaaacattatgtccaaaccatgaaccaacaaccacttgcttcgtcaagatgggctgcttgtgccattggtggtgttcttgctgcgtttattcaaattcttgccactctttttgaatggatttttgtgcctagagaatgggctggtgctcaacatttatctcgtcgtatggtgtttttggtattaatcttctttcttaatttggttccaccagtttatacattccaaattaccaaattggtgatttattctaaatcggcatatgctgtatctgttgttggatttttcattgctgtggccacattagtattctttgctgtcatgcccttgggtgggttattcacttcatacatgaacaagaggtcaagaagatatattgcatcacaaacatttactgccaactacattaaattgaaaggtttagatatgtggatgtcatatttgttatggtttttggttttccttgccaaattggttgaatcttatttcttcttgactttgtcattaagagatcctattagaaacttgtcgaccatgtccatgagatgtgttggtgaagtttggtacaaagatatcgtttgtaaaaaccaagccaagattgttttagggttgatgtatctcgttgatttgttattgttctttttggatacttatatgtggtacattatttgtaactgtatcttttccattggtcgttcattctatttgggtatttccattttgactccatggagaaacattttcaccagattgccaaagagaatttattctaagattttagccaccacagaaatggagatcaaatataagccaaaagttttgatttcacaaatttggaatgccattgttatttccatgtacagagaacatttgttagctattgatcatgtgcaaaaattattatatcatcaagtcccatctgaaattgaaggtaaaagaactttgagagctccaactttctttgtttctcaagatgataacaattttgaaacggaattcttcccaagaaattctgaagctgaaagaagaatttcatttttcgctcaatctttagccactccaatgccagaaccattgccagttgataatatgccaacatttactgttttcactcctcattattcggaaaagattttattatccttgagagaaattattagagaagatgatcaattctccagagtgacattattggaatatttgaaacaattacatccagttgaatgggattgttttgttaaagacaccaagattttggctgaagaaactgctgcttatgaaaatggtgatgattctgaaaaattatctgaagatggattgaaatccaagattgatgatttaccattttattgtattgggttcaaatcagctgcaccggaatatactttaagaacaagaatttgggcttcattgagatcacaaactttgtatagaactgtgtctgggtttatgaattatgccagagctattaaattattatacagagttgaaaaccctgaattggttcaatactttggtggtgatcctgaaggattagaattagctttagaaagaatggccagaagaaagtttagattcttggtttccatgcaaagattatctaaattcaaagatgatgaaatggaaaatgccgagttcttattgcgtgcttaccctgatttgcaaattgcttacttggatgaagaaccggctttgaatgaggatgaggaaccaagagtatactctgccttgattgatggtcattgtgaaatgttagaaaatggtagacgtcgtcctaaatttagagttcaattatctggtaatccaattttgggtgatggtaaatctgataatcaaaatcatgcggttattttccatagaggtgaatatattcaattgattgatgctaatcaagataattatttggaagaatgtttgaagattagatcggttttagctgaatttgaagaaatgaatgttgaacatgttaatccatatgcaccaaatttgaaatctgaagataatagtaccaaaaaagatccagtggcatttttgggtgctagagaatatattttctcagaaaattctggtgttttaggtgatgttgctgctggtaaagaacaaacttttggtacattatttgctagaactttggcacaaattggaggtaaattgcattatggtcatccggatttcttgaatgctacatttatgttgactagaggtggtgtttctaaagcacaaaaaggtttacatttgaatgaagatatttatgctggtatgaatgccatgatgagaggtggtaagatcaagcattgtgaatattatcaatgtggtaaaggtagagatttaggttttggatccattttgaatttcacaaccaaaattggtgctggtatgggagaacaaatgctttcaagagaatatttctatttaggtactcaacttccattggatagatttttatcattttattatggtcatccaggtttccatattaataacttgtttattcaattatcattacaagtgtttattttggtgttggctaatttgaactcattagctcatgaagctattatgtgttcttacaataaggatgttccagttactgatgtgttatatccatttggttgttacaatattgccccagcagttgattggatcagacgttatacattatctattttcattgttttctttatttcctttattccattggttgtacaagaattgattgaaagaggtgtttggaaagccttccaaagatttgttagacatttcatttccatgtcaccatttttcgaagtgtttgttgcccaaatctattcttcatctgttttcactgatttaactgttggtggtgctagatatatttccactggtagagggtttgccacttcaagaattccattttcaattttatattcacgttttgctgattcatctatttatatgggagcaagattgatgttgattttattatttggtacagtttctcattggcaagcaccattattatggttctgggcttcattatcggcgttaatgttttcaccatttattttcaatcctcatcaatttgcttgggaagactttttccttgattacagagatttcatcagatggttatctagaggtaatacgaaatggcatagaaactcttggattggttatgttagactttctagatcacgtattactggtttcaaacgtaagttgaccggtgatgtttctgaaaaagctgctggtgatgcttcaagagctcatagatccaatgttttatttgctgatttcttaccaacattgatttatactgctggtctttatgttgcttacacatttattaatgctcaaaccggtgttaccagttatccatatgaaattcttggttctactgatccacaaccagttaattctacattgagacttattatttgttctttggctccagttgttattgatatgggatgcttaggtgtatgtcttgctatggcatgttgtgctggtccaatgttaggattatgttgtaaaaagactggtgctgtcattgctggtgttgctcatggtgttgccgtgattgttcatattattttctttattgttatgtgggttactgaaggtttcaattttgccagattaatgttgggtattgccaccatgatttatgttcaaagattattatttaaatttttgacattatgtttcttaacaagagaatttaagaatgataaagccaatactgctttttggactggtaaatggtataatactggtatgggatggatggctttcactcaaccagctcgtgaatttgttgctaaaatcattgaaatgtctgaatttgctggtgattttgttttagctcatattattttattctgtcaattaccatttttgtttattccattagttgatagatggcattcaatgatgttgttttggttgaaaccatcaagattgattagaccaccaatttattctttgaaacaagccagattaagaaagagaatggtgagaaaatattgtgttttgtattttgccgtattgatcttgtttattgttattattgttgctccagctgttgcttctggacaaattgctgttgatcaatttgccaatattggtggatctggttctattgccaatggattattccaaccaagaaatgtaagtaacaatgatactggtaatcatagaccaaagagctacagttggacttatttgagtactcgttttactggaagtaccacacattattctacaaatccattcaggatttaa

SEQ ID NO: 78 - DNA, 5694 bp, Candida dubliniensis; identical to SEQ ID NO: 77

SEQ ID NO: 79 - DNA, 5685 bp, Candida glabrata
atggcaaattggcagaacaccgatcccaatgggaactattactacaatggggctgagaacaacgaattctatgatcaggattatgcttctcaacaaccagaacaacaacaaggtggtgaaggttattacgatgagtacggacaacccaactataattacatgaacgacccacagcaaggtcaaatgccacaacaacaacctggtggttatgagaacgacggctactacgactcgtactataacaaccagatgaacgctggtgttggcaatgggttgggacctgaccagactaatttttcagattttagcagctacggaccacctccatttcaaaataaccaagctaattatacaccatcccaactaagttatagcaacaatgggatgggcagcaacggtatgaacatgtctggttcgtcaactccagtatacggtaactacgatccgaacgctatcgcgatgacattaccaaacgacccatacccagcttggaccgctgatccacaaagtcccgtttccattgaacaaatcgaagacgtcttcatcgatctaaccaacaaatttggtttccaaagagactctatgagaaacatcttcgacctgtttatgactttattggactctagaacatccagaatgtctccagaccaagcgttgctatctgtccacgctgattatattggtggtgacactgctaactacaagaaatggtatttcgcagctcagcttgatatggatgatgaagttggtttcagaaacatgaacttgggtaagttatcaagaaaggcaaggaaagctaagaagaagaacaaaaaagcaatggaagaggccaatcctgaagacgctgctgaagtgcttaataaaatcgaaggtgataactctcttgaagcttctgacttcagatggaagactaagatgaacatgctaactcctattgaaagggttcgtcaagtggccctttacatgttaatctggggtgaagctaaccaagttagattcacttctgaatgtctatgtttcatttacaaatgtgcttctgactacctagaatcaccattatgccaacagagaacagagccaatcccagaaggtgattatctaaatagagtcatcactccaatttatcaatttatcagaaaccaggtctatgaaattgtcgatggaccgtttatgtcaaaacgtgaaaaagaaaaggaccataacaagattattggttatgatgatgtcaatcaactgttttggtacccagaaggtatcactaagattgtattggaagatggtactaaattaactgatattccaagcgaggaacgttacttaagacttggggaagtggcttggaacgatgtcttctttaagacatacaaggaaacacgtacttggttacatcttgtgaccaacttcaatcgtatttggattatgcacgtttccgtctactggatgtatgttgcttataactctcctactttctacactcacaactatcaacaactggtaaacaatcaacctgtccctgcttatagatgggcaagtgccgccttggctggtacagtggctagtgcaatccaattgtttgcaactgtttgtgaatggtggttcgttccaaggaaatgggctggtgctcaacatttatctcgtaggttttggtttttatgtggtatcctaggtgttaatcttggtcctttaatttttgtctttgcttatgaaaaggacactgttcaatcgaaggctggtcatgctgtagcagctgtaacgtttttcattgctgtggccactgttttattcttctcgattatgccattaggtggtcttttcacctcatatatgcaaaaatcaagtagaagatatgttgcttctcagactttcaccgcatcttttgccccattacaaggtttggatagatggttatcttatttagtttgggttacagtttttgctgccaagtactctgaatcgtacttcttcttgattttgtctctaagagaccctatcagaatattatcaactactactatgagatgtactggtgagtattggtggggttcaaagttatgtagacatcaatcgaagattgttttaggtttcatgattgctacagatttcattctgttcttccttgatacttatttgtggtacattgttgtcaacactgtcttctctgttggtaaatccttctatttaggtatttccatcttaactccttggagaaatatctttacaagattaccaaagagaatttactcaaagattttggccacaactgatatggagattaaatataaaccaaaggttctaatctctcaaatttggaatgcaattattatttccatgtacagagaacatttgcttgctatcgatcatgttcagaaactgttataccatcaagttccatctgaaattgaaggtaaaagaactctaagagctccaaccttctttgtatctcaggatgataacaactttgaaactgagtttttcccaagaaactctgaagctgaacgtcgtatctcattctttgcccaatcattggctaccccaatgccagaaccattaccagttgacaacatgccaacttttaccgtcttgactccacactattctgaaagaatattgctttctctaagagaaatcatcagagaagatgatcaattttcaagagtcactctattagaatatttgaaacaattgcaccctgttgaatgggaatgttttgttaaggataccaagattctggcagaagaaacagctgcttatgaaaatgaggagcctcaggatccagagaaatctgacgctttgaaaactcaaattgatgatcttcctttctactgtattggtttcaagtctgctgccccagaatacactttacgtacacgtatttgggcatcgttgagatcccaaaccttgtaccgtactgtttctggtttcatgaactacgctagagcgattaaattgctataccgtgtcgaaaacccagagattgttcaaatgtttggtggcaatgctgaaggtcttgagagagaattggagaaaatggctagaagaaagtttaaatttttggtttccatgcaaagattggctaagtttaagccacatgaattggagaatactgaattcttgttaagagcttaccctgatttacaaattgcttatttggatgaagaacctcctttgaacgagggagaagaaccaagaatttattctgccttgattgacggtcactgtgaaatgttggaaaacggtcggagacgtccaaaattcagagttcaattatctggtaaccctattcttggtgatggtaaatctgataatcaaaaccatgctttgattttctacagaggtgaatacattcaattaattgatgctaaccaagacaactatttggaagaatgtttgaagattagatccgttttagccgaatttgaggaattaaatgccgaacccgtctacccatacactcctggtgttaaatatgaagaccagaagactaatcatccagtcgcaattgttggtgctagagaatatattttctccgaaaactctggtgtgcttggtgatgtcgccgctggtaaggaacagacttttggtacattgtttgctcgtacattggctcaaattggtggtaaactgcattatggtcacccggatttcatcaatgctacgtttatgacaacaagaagtggtctatccaaggctcaaaagggtttacatttgaacgaagatatttacgccggtatgaatgccctattacgtggtggtcgtattaagcactgtgaatattatcaatgtggtaaaggtagagatttaggttttggtacaattttgaatttcacaactaagattggtgcaggtatgggtgaacaaatgttgtcccgtgagtactactatttaggtacacaattgcccgtagaccgtttcttgactttctactatgcgcatcctggtttccatttgaataacttgttcattcaattgtctttgcaaatgtttatgctaactttggtcaatttgcatgcgcttgcccacgaatccattctttgtatttacgatagaaataagcctaagactgatgtcttgtatcctatcggttgttacaatttctcaccagccattgattggatcagacgttatacattgtccattttcattgttttctggattgcctttgttcctattgttgttcaagagttgattgaacgtggtctatggaaggctactcaaagatttttccgtcacattctatctctatccccaatgtttgaagtttttgctggtcaaatttattctgctgctctattgagtgacatgactgtgggtggtgctcgttatatatccaccggtcgtggttttgcaacatcccgtattccattctcaattttatactccagatttgccagctctgccatttatatgggggccagatctatgctgatgttattattcggtacagtggcacattggcaagctccattactatggttctgggcatctctatctgctttactgttctctccattcatattcaatccacatcaattttcctgggaagatttcttcttggactacagagactatattagatggttatcaagaggtaacaataagtaccacaaaaattcttggattggctacgtaagaatggcaagatcacgtattacaggtttcaaacgtaagttgattggtgatgattctgaaaaggctgcaggtgatgctaacagagctcatagaacaaacttaatactagctgaattgattccaactgcaattaatgcaggtagttgtttcattggttttaccttcattaacgctcaaaccggtgttaaggccaccgatgatgacagagtcaactccgttctcagagttgtcttgtgtacacttggtccaatcgctgttgatgttggtgtattatttttctgtttgggtatgtcctgttgttctggtccattgtttggtatgtgctgtaagaagacaggtgctgttatggcggcggttgcacacggtgtctcagttgtgattcatattggtttcttcattgtaatgtgggttctagaaggttttaacttcactagaatgctggttggtgttgccacagttatccaatgtcaaagatttattttccaattaatgacaattttactattgaccagagaattcaagaatgaccatgctaacacggctttctggacaggtaagtggtatggttctggctttggttacatggcttggactcaaccaatgagagaattgactgcaaaggttatagagatgtctgaatttgcagctgattttgttcttggtcatgtcatcttatttgcccaattccctgttctttgtattcctgccattgataaattccactcaatcatgctgttctggttgaaaccatctcgtcatattcgcccaccaatttattcattaaagcaatcccgtttaagaaagagaatggtgaagagatacttgactctttacatcattattttcttggtgtttgcaggcgccattgttggcccagctgtcgcccgcctagcccatgtgccacaggatattggccatacattgactggcccattccataacattgttcaacctagaaacaagagtaacaatgatactggtttgcaaatttcgacatacagtaatcattactacacacatacgccatctctaaagacctggtccactataaaataa

SEQ ID NO: 80 - DNA, 2663 bp, Candida metapsilosis
gattttgatctttgtggtgattttggcaccagttgtgtacacatttaaagttgccggattgaccttgtattccaagtcggcatatgccctttcagttgttggatttttcattgcagttgccacattggttttctttgctgtcatgcctttgggtggattgtttacctcttacatgaacaaacgttcaagaaggtatatctcgtctcaaacatttacagcaagctttgtcaaattgagagggttagatatgtggatgtcgtacttgttatgggtcttggttttccttgctaaattggttgaatcttatttcttcttaaccttgtcattgagagatgccattaggaacttgtcaaagaccacaatgagatgtactggtgaggtttggtatggtgatgttgtctgtaggcatcaagccaagattgtattgggattgatgtacgctgttgatttgttgttgttctttttggatacttatttgtggtacattatctgtaactgtatcttttccattggtcgttcattctacttgggtatttcaattttgacaccatggagaaatattttcaccagattaccaaagagaatctattccaagattttggctactactgaaatggagatcaagtacaaaccaaaagttcttatctcacaaatttggaatgctattgttatttctatgtacagagaacatttgttagccatcgaccatgttcaaaaattgttgtaccatcaagttccatcagaaattgaaggaaagagaactttgagagcaccaacattctttgcatctcaagatgataacaactttgagacggaatttttcccaagaaactcagaagctgagagaagaatttcattctttgcacaatccttggctactccaatgcctgaacctgttccagttgataatatgcctacatttaccgttttcaccccacattactctgaaaagattttgttatcattgagagaaattattagagaggatgaccaattttcaagagtcacgttgttggaatacttgaaacaattgcacccagtggagtgggaatgttttgttaaagataccaagattttggcagaagaaacagctgcttatgaaaatggtgaggatgccgagaaagcatctgaggatggattgaaatccaagattgatgatttgccattctactgtatcggtttcaaatctgctgctcctgagtacacattgagaacaagaatttgggcttctttgagatcacaaactttgtacagaacagtttccggtttcatgaactatgctagagctataaagcttttgtacagagttgaaaatccagaattggtgcagtactttggtggtgatccagaaggattggaattggctttggagaaaatggctagaagaaagtttagatttttggtttctatgcaaagattgtccaaatttaaggacgatgagatggagaatgccgaattcttgttgcgtgcttatccagacttacaaattgcttacttggacgaagaaccagctttgaacgaagacgaagaaccaagagtttactcttccttgattgatggtcattgtgaaatgttggaaaatggtagacgtcgtcctaaattcagagttcaattgtccggtaatccaatcttaggtgatggtaaatctgataaccagaatcacgccattattttccacagaggtgaatatatccaattgattgatgccaatcaagataactatttggaagaatgtttgaagattagatccgttttggctgaatttgaggaattgaatgttgaacatgtcaacccatactcgccagatttgaaatctgaagatgtattgcatgaaaagaaggctcctgtcgccatcttgggtgctagagaatatattttctcagaaaactctggtgttttgggtgatgttgccgctggtaaagaacaaacttttggtactttgtttgcaagaacattggctcaaatcggtggtaagttgcattatggtcaccctgatttcttgaatgctacatttatgttgacaagaggtggtgtttccaaagctcaaaaaggattgcacttgaacgaagatatctatgctggtatgaatgcagtgatgagaggaggtaaaattaagcactgtgaatactaccaatgtggtaagggtagagatatgggttttggatctattttgaatttcactaccaagattggtgccggtatgggtgaacagatgttgtcaagagaatactattatttgtcaactcagttgcctttggatagatttttgtcattctactacggtcacccaggtttccacattaataacttgttcattcaattgtctttgcaagttttcatgttggtgttggcaaatttgaactccttggcacacgaatcgattatctgttcttatgatagggacgttccagttacagatgtgttgtatccatacggttgttataacattgcccctgctgttgactggatcagacgttatacattatctatctttattgttttcttcatttcgtttattccattggttgttcaggaattgattgaaagaggtgtatggaaggctgcccagagatttgttagacatatcatctccttatcgccaatgtttgaagtctttgttgctcaaatctattcatcatctgtctttactgatatgactgttg

SEQ ID NO: 81 - DNA, 2467 bp, Candida orthopsilosis
atatcatcacacactttcacggcaaattttgtcaaattgagaggtttggacatgtggatgtcttacttgttgtgggtcttggtttttcttgccaagttggttgaatcttatttcttcttgactttgtcattgagagatgcaatcagaaatttgtcaaagaccacaatgagatgtacaggtgaagtttggtatggtgatattgtctgtagacaacaagccaagattgttttgggattgattgatgctgtcgatttgttgttgttcttcttggatacttacttgtggtacattatctgtaactgtatcttttccattggtcgttcattctacttgggtatttcaatcttgactccatggagaaacattttcaccagattgccaaagagaatctactcaaagattttagccactaccgaaatggagatcaagtacaaaccaaaggttcgtatctcacaaatttggaatgctattgttatctcaatgtacagagaacatttgttagccattgaccacgttcaaaaattattgtaccaccaagttccatcggaaattgaaggaaagaggactttgagagcaccaaccttttttgcttctcaagatgacaacaactttgaaacggagtttttcccaagaaactcagaagccgagagaagaatttcattctttgcacaatcattggctacaccaatgcccgaacctgttcctgttgataatatgccaacattcactgttttcactccacactattccgaaaagattttgttatcattgagagaaattattagggaggatgaccaattctcaagagttacattattggaatacttgaagcaattgcatccagttgaatgggaatgttttgttaaggataccaagattttggcagaggaaacagccgcttatgaaaatggcgaagatgccgaaaaagcctctgaagatggattgaaatctaagatcgatgacttgccattctactgtattggtttcaaatcggctgctcccgagtacactttgagaacaagaatctgggcttcattgagatcacaaactttgtatagaacagtttctggttttatgaattatgccagagccatcaagcttttgtacagagttgaaaacccagaattggtgcaatatttcggcggtgatccagaaggattggaattggctttggaaaagatggccagaagaaaatttagattcttggtttctatgcaaagattgtccaagttcaaggatgatgaaatggagaatgccgaattcttgttgcgtgcttacccagatttacaaatcgctttcttggatgaagaaccagctttgaatgaggacgaggaaccaagagtttactccgctttgattgatggtcattgtgaaatgttagaaaatggtagacgtcgtcctaaattcagagtccaattgtctggtaatccaattttgggtgatggtaaatcagataaccaaaatcatgctattattttccacagaggtgaatacattcaattgattgatgccaatcaagataactatttggaagaatgtttgaagattagatctgttttggctgaattcgaagaattgaatgttgaacatgtcaacccatactctccagatttgaaaactgaagatccattacacgaaaagaaggctcctgttgccattttgggtgctagagaatatatcttttcagaaaactctggtgttttgggtgatgttgctgctggtaaagaacaaactttcggtactttatttgcaagaaccttggctcaaattggtggtaagttgcattatggacatcctgatttcttgaatgctacatttatgttgacgagaggtggtgtttccaaagcacagaaaggattgcacttgaacgaagatatctacgccggtatgaatgcaatgatgagaggtggtaagatcaagcattgtgaatactaccaatgtggtaaaggtagagatatgggtttcggatctattttgaatttcacaaccaaaattggtgctggtatgggtgaacaaatgttgtctagagaatattactacttgtcaactcaattgccattggatagattcttgtcattctactatggtcacccaggtttccatatcaataacttgttcattcaattatctttgcaagtctttatgttggttttggcaaacttgaactcattggcacatgaatcaatcatctgttcatatgatagagatgttccagttaccgatgtcttgtatccatttggttgttacaatatctcccctgccgttgattgggttagacgttatacgttgtcgatcttcattgtcttcttcatttcgttcattccattggttgttcaagaattgattgaaagaggtgtatggaaagcctgtcaaagatttgttagacatttcatttccttgtcgcctatgtttgaagtctttgttgcacaaatctattcgtcatctgttttcactgatttgactgttg

SEQ ID NO: 82 - DNA, 7670 bp, Candida parapsilosis
tttacactaccatttttataaatgtcagctgcttctatctgcagtctctactggaaggaaattcctgcaacttcaacatatccaattacgttacgcaccagcttatgggacatgcctacaactactaccatctcgacaaacgtaaatgtcaatcaccatcatttgctttttacacgtgaacggagccaatttcttttacattttttttttttttcgtgtctcaaaatcaaaaagcaacacaacacaacacaacagaatcaaaaaaaaagaaaaagaaatttttatgtttgctaaaacccctttcaccaacactttttttttttaaaaaaaaaagagaaagagaagttatcatatacaattacacaatgattgacgataaataactcatcttgcatttcgcccgatttatccagctgttgcttcaatatggaaataatgcattgtgtttgtgttttttatgtggtgtggtgtgtgtgtgtcctttgtaccaatttctctcgagaagttctatttttaacaataggagtgtgttacaaaacacaggaaaaaaaaaaaggagaattatagaaaaaaaaaaaaaaaataaagaaatgttaggtaaaacaacagaggagagaaagaaaatttttgacatctgaaatcgggctgtggatttaaaaagattattgaaattactacattgatatacacacgatatcgagaaaaaggttttctttctttttttcttctttttacccttttatttttccaatctaactgctacttcaactttgcagtcttttggtcatagcaagatcttgaaaggaaatctcatttgtcgctatcaataaggggtccagatttgaccgattccagatcactcgctatattataaaatcaagaattttgttttcctatttttttatttgaacgaaaatctaaccacatttatatcctcgtgtttttgctatattgatcctttactttgaaatacttaacatcgccatagagtaagtggggttactaacattagcagatgtcgtataacgataacaaccataactattacgaccctaatcaacagggtggtggtgtccctaatgatgggtactaccaacaaccgtatgatatgaatcagcagcaacaacaacaacaacaacaaccatacgatgatatgaatcagcagccacaacaccaggattattatgatcctaatgcgcaatatcaccagcaaccttatgatatggatggttacaatgatccaaaccaatatggaggtcatccaatgaatgctcaaggttacaatgctgatccagaagcattttcagatttcagttacaatggacaagctccaggtaccccgggttatgatcaatatggaacccaatacactccatctcagatgagttatggtggtgatccaagatcttccggtgcctcaacaccaatttatggagtccagggtcaaggttatgatcctactcagtttcaggtgtcgtccaacttaccatatccagcatggtcagctgatcctcaagcacctatcaagattgaacacattgaggatattttcattgacttgacaaacaaatttggtttccaaagggattcaatgagaaatatgtttgattactttatgactttattggattcaagatcatcgcgtatggctccagctcaagcattgttgagtttacacgctgactacattggaggtgacaatgcaaattacagaaagtggtttttttcatcacaacaagatttggatgatactttgggatttgccaatatgactttgggaaaaattggtagaaaagctagaaaggcttccaagaaatccaagaaggccagaaaagcagctgaagaacatggtgaagatgttgatgctttagccaatgaattggaaggtgactattcattggaagctgctgaaatcagatggaaagcaaagatgaacaccttgactcctgaagaaagagttcgtgatattgctctttacttgttgttatggggtgaggctaaccaagttcgttttactccagaatgtttgtgttatctttacaaaacagctgttgactatttggaatcaccattgtgtcaacaaagacaagaaccagttccagagggagactacttgaaccgtgtcattactcctttatacagattccttagatcccaagtttatgaaatttatgagggaagatttgttaagcgtgaaaaagatcacaacaaggttattggatacgatgatgttaaccaattgttttggtacccagaaggtgtttcgagaatcattttcactgatggtacgagattgattgatattccaaaggaggaacgttacttaagattgggtgaagttgagtggagcaatgtctttttcaagacttacaaagaaatcagaacttggttgcattttgtcaccaactttaacagaatttggattattcatggaagtatttattggatgtataccgcttacaactcgccaacattgtacaccaagaactatgttcaaaccattaatcaacagccacttgcctcatcaagatgggcagcttgtgccattggtggtattattgccgcattcctccaaattctcgccactatttttgaatggatgtttgttcctagagaatgggccggtgctcaacacttgactcgtcgtttaatgtttttgattttgatctttttggtaaacttggctccggttgtgtacacttttaaagttgcaggattgactttatactccaagtcctcatatgcactttctgttgttggattcttcattgctgttgcaactttggttttctttgctgtcatgcctttgggaggtttgttcacctcgtatatgaacaagaggtcgaggaggtacatctcgtctcatacttttactgcaaactttgtcaagttaagaggattggacatgtggatgtcgtatttgttgtgggtcttggttttcctagcaaagttggttgaatcttatttcttcttgactttgtcattgagagatgctattagaaacttgtcaaagaccacaatgagatgtaccggtgaagtttggtatggtgacattgtctgtagacaacaagccaagattgtgttgggattgatgtacgctgtcgatttgttgttgttctttttggatacctacttgtggtacattatctgtaattgtatcttttccattggtcgttcattctatttgggtatctcaatcttgacaccatggagaaacatctttaccagattaccaaagagaatttactcaaagattttggccaccaccgaaatggaaatcaagtacaagccaaaggttcttatctcacaaatttggaatgccattgttatctccatgtacagagaacatttgttagctattgaccatgtgcaaaagttattgtaccatcaagttccatcagaaattgaaggaaagagaactttgagagcaccaacattctttgcttcccaagatgacaacaattttgaaacggagtttttcccaagaaattctgaagccgaaagaagaatttcattttttgcccaatcgttggccactccaatgccggaacctgttcctgttgataatatgcccacgttcactgttttcactccacactattcggaaaagattttgctttcattgagggaaattattagagaagatgaccaattttcaagagtcaccttgttggaatatttgaaacaattgcatccagttgaatgggaatgttttgttaaggacactaagattttggcagaagaaacggctgcatatgaaaatggtgaagatgcggaaaaagcatctgaagatggattgaaatcaaagattgatgatttgccattttattgtattggtttcaaatctgctgcacctgagtatactttgagaacaagaatttgggcttccttgaggtcgcaaactttgtacagaacagtatccggttttatgaattatgctagagccatcaagcttttgtacagggttgaaaatccagagttggttcaatactttggtggtgatccagaaggattggaattggctttggagaaaatggccagaagaaagtttagatttttggtttccatgcaaagattgtccaaatttaaggatgacgaaatggagaatgcagaatttttgttgcgtgcttacccagatttacagattgctttcttggatgaagaaccggcattgaatgaggacgaggaaccaagagtttactcttctttgattgatggtcattgtgagatgttggaaaatggtagacgtcgtcctaaattcagagttcaattgtccggtaatccaatcttgggtgatggtaaatccgataaccagaatcacgcaattattttccacagaggtgaatatattcaattgattgatgccaatcaagataactacttggaagaatgtttgaagattagatcagttttggctgagtttgaagaattgaatgttgagcatgttaatccatattcaccagatttgaagtctgaaaatccattgcacgaaaagaaagctccagttgctattttgggtgctagagaatatatcttttcagaaaactctggtgtcttgggtgatgtcgctgctggtaaggaacaaacttttggtactttgtttgccagaacattggctcaaattggaggtaaattgcattatggtcacccggatttcttgaatgctacatttatgttgactagaggtggtgtttctaaagcacaaaaagggttgcatttgaacgaagatatttacgctggtatgaatgccatgatgagaggtggtaagatcaagcattgtgaatactatcaatgtggtaaaggtagagatatgggtttcggatccattttgaacttcacaaccaagattggtgccggtatgggtgaacagatgttgtctagagaatattactacttgtcaactcaattgccattggataggttcttgtcattctactacggacatcctggtttccatatcaataacttgtttattcaattgtccttgcaagtctttatgttggtgttggcaaacttgaactcattggcacacgagtcaattatttgttcgtatgatagagatgttccagtcactgatgtcttgtatccatttggttgttacaacattgctcctgctgttgactggattagacgttacaccttgtctatctttattgtgttcttcatttcgttcattccattggttgttcaagagttgattgaaagaggtgtgtggaaagcttgtcaaagatttgttagacatttcatttcgttgtcacctatgtttgaagtttttgttgcccaaatttattcatcatctgttttcaccgatttaactgttggtggtgccaggtatatttcaaccggtagaggttttgccacttcaagaatccccttttccatcttgtactcccgttttgctgactcgtcaatttatatgggtgctagattgatgttgattttgttgtttggaaccgttgctcattggcaagctccattgttgtggttctgggcttcgttgtcttcattgatgttttcgccattcatctttaacccacatcaatttgcttgggaagactttttcattgattacagagactttattagatggttgtctagaggtaacaccaagtggcacagaaattcatggattggttacgttaggctttcgagatctcgtattaccggtttcaaacgtaagttgactggtgatatttctgaaaaggctgctggtgatgcatcaagagctcacagatctaacattttgtttgctgatttccttccaacattgatttacactgctggtctttatgttgctttcacatttatcaacgctcaaaccggtgtcactcagtatccatacgaaattgatggtagtacagacgttcaagaagtcaattctgttttgagacttatcgtgtgttccttggcccctgttgttattgactgtggtgttttgtttggttgtgttggtatggcatgttgtgctggaccaatgatgggcttgtgctgtaaaaagaccggtgccgtcattgccggtattgctcatggtattgctgtgattgtacatattgttttctttattgtcatgtgggttatggaaggtttcaactttgccagaatgttgttgggtttcgctactatgatttacgttcaaagattgttgttcaagtttttaactttagctttcttgaccagagagttcaagaatgataaggccaatactgcattctggacgggtaagtggtacaatactggtatgggatggatggctttcactcaaccatctcgtgaatttgttgccaagattgtcgaaatgtctgagtttgctggtgatttcatgttggctcatatcatcttgttctgtcaattacctatattggcagttccattgattgacagatggcactcaatgatgttgttctggttgaaaccatctagattgattagaccaccaatttactcattgaaacaagctagattgagaaagagaatggtgagaaaatatgttactttgtactttgcagtgctcttgttgtttgttgtgattattgctgccccagctgctgcttctggatctatcaaggttgatcagtttgctgacattggatctaagggctcaattgcatatggtttgttccaaccaagaaacgtttctaacaacgataccggtcctacgaacagaccaaagtcttatacttggtcatatttgagtgaaaagtattctggccatacgacagcatattctacgaatgcgttcagataaatgcttatttgtacatgagtggatccttgcttccatcctatttttgtttattgtttttttattttgatgtttgatatttatagataaattcgaagaattacttgtatttttgtaaatggtgatgcatgtaatatttgtgttgtttcgtgtaaactggtatgcatgcatgacaccaccaccttgtctcttgaaatggttcttagctactctcaagttttgaagcaaaaaaaaaaagacaaaaaaatcagtccagattgaacctttcttagtgagtttactcaattacaaacacaacacaagatacacatcgctgaacatgggatttttacgaggcaaggatattccactatcgacagaagtcttattaggacttttgaccaccatcagtgcctttttgtttgtaatcaaataccgaatgttcaaggactcccaaacgtctggatcggaggagttgaactttcatgatatattagtaccctttattcaattgattcccagcaccaccctcttcaacccttgggtacttatactggccatttttgccgaaatttccgtcatatctttcatcttttcgtttgtggtcttgtttgttggaagcagatttgttgaacgattttggggacgcatggaagtgatcaaattcgtcttggttgttggcggagtgaccaatttgattactgttttggttgctattatatccaatttgataagagaagatgcaaagaatatgaacactcccctagggggaggtatatcttactattttggctttcttgttgtatttaagcaattgataccggagcacaacattgtcttgtttcaaggcttggtgaatttcagagtgaaacatttgccatttgcgttgttgattattttagggctctggtcggcaattgtcagtcaatcatcttacccagctgtccca

SEQ ID NO: 83 - DNA, 3993 bp, Candida tropicalis
gctgtttccgttgtcggtttctttattgctattgccactttagttttctttgctgtgatgccattgggtggtttattcacttcatacatgaacaagagatctagaagatacatttcttctcaaacttttactgccagttatatcaaattgcatggtttagatatgtggatgtcctacttgttgtggttccttgttttccttgctaaattggttgaatcttatttcttcttgactttgtctttaagagatccaatcagaaacttgtctaccatgaccatgagatgtgtcggtgaagtttggtacggtgacgttgtttgtagaaatcaagccaaaattgtcttgggtttgatgtatcttgttgatttgttattgttcttcttggatacttatatgtggtacattatctgtaactgtatcttctccattggtcgttccttctacttgggtatttccatcttgactccatggagaaacattttcaccagattgccaaagagaatctactccaagattttggccaccactgaaatggaaatcaagtacaaaccaaaggttttgatctcccaaatttggaatgctattgtcatttccatgtacagagaacatttattggctattgatcacgttcaaaaattgttgtaccaccaagttccatctgaaattgaaggtaagagaactttgagagccccaactttctttgtttcccaagatgacaacaattttgaaacagaattcttcccaagaaactctgaagctgaaagaagaatttctttctttgctcaatccttggctactccaatgccagaacctttgccagtcgacaacatgccaactttcactgttttcactcctcattattccgaaaagattttgttatctttaagagaaattattagagaagatgatcaattctccagagtcactttattggaatacttgaaacaattgcacccagttgaatgggattgttttgttaaggacacaaagattttggctgaagaaactgctgcttatgaaaacggtgatgattctgaaaaattatcagaagatggtttgaaatccaagattgatgacttgccattctactgtattggtttcaaatccgctgctccagaatatactttgagaactagaatttgggcttctttgagatcccaaactttgtacagaactgtttccggtttcatgaactatgccagagctatcaaattgttgtatagagttgaaaaccctgaattagttcaatactttggaggtgatccagaaggtttagaattggctttggaaagaatggccagaagaaagttcagatttttggtttctatgcaaagattatccaaattcaaagatgatgaaatggaaaatgccgaattcttgttgcgtgcctacccagacttgcaaattgcttacttagatgaagaaccagctttgaatgaagacgaagaaccaagagtctattcttccttgattgatggtcattgtgaaatgttagaaaatggtagacgtcgtcctaaattcagagtgcaattgtctggtaacccaatcttgggtgatggtaaatctgataaccaaaatcatgctgttattttccacagaggtgaatatatccaattgattgatgccaatcaagataactatttggaagaatgtttgaagattagatctgttttggctgagtttgaagaattgaatgttgaacatgttaacccatatgctccaaccatgaagaatgatgaaaacaacatcaagaaggatccagttgcattcttgggtgccagagaatatattttctctgaaaactctggtgttttgggtgatgtcgctgccggtaaagaacaaactttcggtactttgtttgctagaactttggctcaaattggtggtaaattgcattatggtcacccggatttcttgaatgctacatttatgttgaccagaggtggtgtttccaaggcacaaaagggattgcatttgaatgaagatatttatgccggtatgaatgccatgatgagaggtggtaagatcaagcattgtgaatactaccaatgtggtaaaggtagagatttgggtttcggttctattttgaatttcactaccaagattggtgctggtatgggtgaacaaatgttgtctagagaatatttctacttgggtactcaacttccattggacagattcttgtcattctactatggtcatccaggtttccatatcaataacttgtttattcaattgtctttacaagttttcatcttggttttggcaaacttgaactctttggctcatgaatctattatctgttcttacaataaagatgtcccaattactgatgtcttgtatccatttggttgttacaatctttctccagctgttgattggattagacgttatactttgtctatctttattgttttcttcatttccttcatcccattggttgtccaagaattgatcgaaagaggtgtttggaaagcattccaaagattcgttagacactttatttcattgtctccaatgtttgaagttttcgttgctcaaatctattcttcatctgttttcactgatttgactgttggtggtgctagatatatttccactggtagaggttttgctacttctagaattccattttcaatcttgtactcacgttttgctgattcatctatttacatgggtgctagattgatgttgattttgttgtttggtactgtttcccactggcaagcaccattgttgtggttctgggcttcattgtcttcattgatgttctcaccatttattttcaacccacatcaatttgcttgggaagatttcttcattgattacagagatttcatcagatggttgtctagaggtaacaccaaatggcacagaaactcctggattggttacgttagactttctagatctcgtatcactggtttcaaacgtaagttgactggtgatgtttctgaaaaggctgctggtgatgcttcaagagcccacagatccaatgtgttctttgccgactttttgccaactttgatttacactgctggtctttatgtcgcctacacttttatcaatgctcaaactggtgtcacttcatatagttatgaaatcaatggttctactgatccacaagaagtcaatgctacattgagacttatcatttgtgccttggccccggttgttattgactgtggttgtttggccgtttgtgttggtatggcctgttgtgctggtccaatgttgggcttgtgttgtaaaaagactggtgccgtcattgctggtattgcccatggtgttgctgtcattgtccacattgtctttttcattgtcatgtgggttactgaaggtttcaactttgctagaatgttgttaggtttagccaccatggtttatgttcaaagattattgttcaagttcttgaccttgtgtttcttgactagagaattcaagaatgataaagccaacactgctttctggactggtaaatggtacaacactggtatgggttggatggcatttactcaaccatctcgtgaatttgttgccaagatcattgaaatgtctgaatttgctggtgatttcatgttggcccatattatcttgttctgtcaattaccaatcttgtgtattccattaattgatagatggcactccatgatgttgttctggttgaaaccatccagattaatcagacctccaatctattccttaaaacaagccagattaagaaagagaatggttagaaaatactgtgttttgtactttactgttttgattatgcttgttgttattattgccgctccagctgctgcctctggtcaaattgctgttgatcaatttgccaatattggtggttctggatccattgctaatggtttgttccaaccaagaaatgtcagtaataatgatactggtaatcataaaccaaaatcatacacttggagtttcttgagtacccgtttcactggtactaccaagggttattccacaaatccattttag

SEQ ID NO: 84 - DNA, 687 bp, Clavispora lusitaniae
atgcgccaaagcgttcaagttagccaaaaccaacataaaactctgcaacgacaactgaataaacaagttattgatatggaaaccagggtgaccgtagtagaaggacaagaatctgtccaatggcaattgagtcgacaagtagtagtattctctggacaacatctgttcacccataccagcaccgatcttggttgtgaaattacagatagaaccgaaacccatatctctacccttaccacattggtaatattcacagtgtttgattcttcctcctctcaacattgcagtcataccagcgtagatatcttcgttcaagtgcaatcccttttgagccttcgagacaccacctctagtaaacataaaagtggcattcaagaaatcagggtgaccataatgcaatttacctccaatttgggccaacgttctagcgaacaaagtaccaaaagtctgttccttaccagcagcaacatcacccaagacaccagagttctccgagaaaatgtactctctggcacccaaaatggcaacaggggattcgcgttgttcctcgctgttcttcaagtttggagcatatggattcacgtgttcaacattcaattcttcgaattcagccaaaacagatctgatcttcaaacactcttcaaaatagttgtcttgattggcatcgatcaattgaatatattcaca

SEQ ID NO: 85 - DNA, 7306 bp, Coccidioides posadasii
ggattctattggccgctcacgttcttttttatctttgtttgcatgcgtccgccaatacgggtcgagcatgagcgcatcgccgtaagttacaccggcacaccctcctggggccaataattagggagaaaaaagttggtgccctgatcaactccgctcgccctgctctggcgtcttccgttgtcctgatctctcgctcccctttcccaccgctggcttggtgtgtgttgatctccctccacttacctcaatcttgttccggtgctctcgttcttttcttttacctcttctcacactcttttgttttttgatctttttttttttttggctctctccccccttacctgttgttttcccttgaactctttttcgcccttcttctcgcaaggaggaggtcactgtcctgacttaccctcacactcatttgggaagctggactgttaggagtgactttcgctgttccattgattgtgcctgccagcacgggctcacatcctctcgctgcagccacacagaaaaagccccatcgctcttcgctcgtttcactaatcaccaaaatcgcccgtgttgatcatcactcgctccaatcactcggttcctatctttatagcccttccgtcggggtctcacaactctccagactgtggttgtcaacaaaattcaccagccaaaaaaactggccttttgaatgttggaatcataatcttgtatgttccgcgagtcgggtagtctcaaagggtcttccgagacacgcccagccactccccgcttgatcgatacctgctgataagctcgaccagacgaatccactatccgccccgtcttgttgctattctcggctctgtcaggcagcccgccacatctttggtagatgaggtgagtccttctcgaaattctttgatgtcggctacacgggaggagttgtatctctgctggtgcaccagttgttgacctgatgttctccgtatctataaattagcattatcggcttctcctgattcatcatgtcggcatatccgcaaggtgctggaggaggaggaggaggaggcggcggcggcggcggtgcccaggatccctacgacgattatcatcagggccatggcgatgcctactatcaagatcaaggatattatgaccaagccgattactcccagcatggggatggctactatgacagaaagtaagaacgagcgttttctcgacacgagtttgtttaaactgacaacaccggctcccagtggttacgatcccaacaacccgtaccagcaagacggttactatgataaccaatatggttatcaagacgattactacaatgaccagtattacgaccaaggatctggcccgtccaacaactggcagggtggatatccccgtcgcggtgactctgaagaggattctgaaactttcagcgactttactatgcgatctgagactgcccgcgcagcagacatggactattatggccggggagatgatcgatataatagctatagcgacagccagatgggaggcagaggctatagacccccttcttcccagatctcctatgggggaaatcgatcttcgggcgcctcgacaccgatatacggtgattacagcaacgtcctgcccccaggccaaagatcacgggagccatacccagcatgggcgtcagacgctcagattcccgtttcaaaggaagagattgaggacatctttttggatctggtcaataagttcggtttccagcgtgacagtatgcgcaacatgtacgatcacttcatgacccagctcgactcccgtgcatcgcgtatgacaccaaaccaggcacttctttctctccatgcggattatattggaggagacaacgcaaactatcgacggtggtacttcgctgctcacttggatctcgacgatgccgtcgggttcgcgaacatgaaacttggcaaaacaaaccgcagaacccgcaaggcgcgcaaggctgcaaagaaagcacagtcggatcccaacaacgaagagcaagcattggagtctatggaaggcgataacagtcttgaggccgccgaatatcgatggaagactcgcatgaatcgcatgtcacagcatgagagagcccgtcagatcgctctgtacttgctttgttggggcgaagccaaccaggttcgattcatgcctgaatgcctgtgcttcatctttaagtgtgccgatgactaccttcggtccccggaatgccaaaatcgtgtcgaacccgttcctgaattcacctacctcaacgagatcgttaccccgctctaccagtattgtcgtgaccaaggctatgaaattttggatggaaaatatgttcgtcgcgaaagggaccacaacaagattattggatacgatgacatcaatcaactgttctggtatcccgaaggtattgaacgtatcattctcgaggacaagaccaggctggttgacgttccacccgcggaacgctatatgaagcttaaagatgtcaactggaagaaggttttcttcaagacgtacaaggaaactcgatcttggttccacatgcttgtcaacttcaatcgcatttgggttatgcacgttactggtttctggttctatacagccttcaactccaagccattgtacaccccaaactacgaacagaggttagacaatcaacctaaggctgccgcgacatggtctgcagtgggccttggaggggcgattgcgtcgctgattatgatcggtgcaacacttgcagagtgggcatacgtcccaagacaatgggctggcgctcagcatttgacaaaacgattgctcttcttgatcgtggtcttcgtgataaatttgggaccgagcgtctacgtttttggaatccgtcaggatgacaagatagccctagtcctgggtatcgtccagttcttcatagcattggcaacatttattttcttctccgtcatgccacttggtggactttttggcagttacctgacaaagaattcccgacgatacgttgctagtcagactttcacagccagtttccctcgtcttcgtggaaacgatatgtggatgtcgtacggtctctgggtatgcgtgttcaccgcaaagttcgttgagtcttacttcttcttgactctttccatcaaagacccaatccgaatcctgtcgatcatgacgatacatcggtgtgccggtgacgctattcttaaggatatcctctgtaaataccagcccaagatcctcctgggcttgatgttattcactgatttggtgttgtttttcctcgacacttatctgtggtacatcatcttgaacacgatcttctccgttgcacgttccttctacctcggtgtgtcaatctggactccctggcgaaatatattctcccgcctcccaaaacgtatctattcgaaggtccttgcaactaccgacatggaaatcaagtacaagccaaaggttttgatatcccaaatatggaacgccgtggtcatctccatgtaccgcgaacacttgttggccatcgatcatgttcagaaactgctctatcaccaggtcccatccgaacaggagggcaagcggactctacgtgctccaaccttctttgtttctcaggaagatcattcgtttaagaccgagtttttcccctctcagagtgaagcggagcgtcgtatctcctttttcgcacaatccctttccaccccgatcccggaaccggttcccgtggacaacatgccgacttttacagtgctcattccccattatagcgagaagatcctcctatcgttgcgagagattatccgcgaagatgaaccctactctcgcgtgacacttttggagtacttgaaacagcttcacccacatgaatgggactgcttcgtgaaggacaccaagattttggcagacgagacctcgcaattcaacggcgagtacgagaagagcgagaaagacgcagccaagagcaaaattgacgaccttccattctactgtatcggtttcaaatcggccgctcctgagtatactctgcgcactcgtatctgggcatcactccgttctcagaccctgtatcgtacaatttccggttttatgaactatagtcgcgcgatcaagcttctctaccgtgtggaaaaccccgaagttgttcaaatgtttggcggaaattctgaaaaattggaacgcgaattagaacggatggctcgtcgaaaattcaagatctgtgtctccatgcaacgatacgcgaaatttagcaaggaagagcgcgagaacacggagtttttacttcgtgcataccctgacctccaaattgcatatttggacgaagaacctccagtcaacgaaggtgaagagccacgtttgtattctgcactcatcgatggtcattcggaaattatggagaacggcttacggcgaccgaaattccggattcaactttctggcaaccctattcttggagacggtaaatctgataatcagaaccacgctattatcttttaccgcggcgaatatgttcagcttattgatgccaatcaggacaactatctggaagaatgtcttaagattagaagtgttttggctgagttcgaagagatgaccacggacaacgtttccccttatactcctggcttacctccaacaaaaaccaatcccgttgctatccttggagctcgtgaatatattttctcggagaatatcggtatcctcggtgatgtggctgctggaaaagaacaaacattcggtaccctgttcgcgcgtactatggctcagatcggtggtaaattgcactatggacatcctgactttttgaatggtatcttcatgacaactcgtggtggtgtttccaaagctcagaaaggtttgcacctcaacgaagatatctacgctggcatgaacgcacttcttcgtggcggtcgtatcaagcactgtgaatactaccagtgcggtaaaggtcgtgaccttggtttcggatccattctgaacttcaccactaagatcggaaccggtatgggagagcaaatgttgtcgcgagagtattactacttagggacccaattgcctcttgaccggtttttctccttcttctacgcccaccccggtttccacatcaacaacctgttcatcatgctttcagtccaaatgttcatgatctgtcttatcaacttgggagctctgcgacatgagaccattccttgtgtctacaaaaagggtgtgccgattaccgatcctttgaagccaactggttgcgccgacatcaatccggttcgtgactgggtccagcgttgcattgtctcaatttgtatcgtgttcttgatctctttcgttccattggtggttcaggagttgaccgaaagaggatgctggcgtgctgccacccgtttggcaaaacattttggttcattctccccgctcttcgaggtcttcgtgtgccagatttatgccaattctctgcacaacaacttgtcattcggtggtgctcgatatatcggtacaggaagaggttttgcgactgctcgtattccatttggagtgttgtattctcgtttcgcgggcccatccatctacctcggtgccagatcgttgatgatgttactcttcgcaacggcaacagtctgggctgcatggcttctgtacttttgggcatcgcttttggccctttgcatttcgccatttttgtttaacccccaccagtttgcctggaatgattttttcatcgactatcgcgactacttgcgttggctgtctagaggcaattcacgctcacacgcctcgtcctggatcgctttctgccggctttcccgtactcgaatcaccggctacaagcgtaaagtgcttggttccccttcagagaaactttctgccgatgcaccaagggcacacctgtctaatatcttcttcagcgagatcgttgggccgctggtccttgtcgctgttacgcttattccgtatctatttattaatgctcagaccggagtgcaagacaaccccaagcctactaattcactgattcgtgtcggtattgttgcattggcaccaattgctatcaacgccggtgtccttgctgcgctctttggaatggcttgttgcatgggtccgattttaagcatgtgctgcaagaaatttggttctgttcttgcagcgattgcccatggtgttgctgttattgctctcttggctctctttgaggtcatgttcttccttgaagggtggtcgttcccgagggctctcataggaatgatcgcggccactgccattcagcgatttgtcttcaagctgatcatttcccttgcgctaacgagagaattccggcaagactcctccaatatcgcatggtggactggaaagtggtacaacatgggctggcattcgatctctcaacccggtcgcgagttcctttgcaaaattactgaactcgggttgttcgctgccgacttcattctcggtcatgtacttttgttctttatgcttcccgcactttgcatcccattcgtcgacaagttccattcagtcatcttgttttggttgcgcccaaggtatgtggcttgatatcccttcggtcattaaccctcatatcgttctaacagtatcgtagtcgtcaaattcgccctccgatctactctctgaagcaatctaaacttcgaaagcgcagagttatccgctttgccattctttacttcctgatgctcatccttttcgttatcttgattgcagggccattaattgcgcgtcgcttcatcaccgaattcccggacatcccctttgatctactgcaacctattaatcaggataatgatgacaccacaaatgaagaaacaggttctggtttaccagacatggcgtcggccacagcccggatgatgttgctttgaacgtgagaatacatgtgcatctatgattcccaacattgtttaagatgcttcagtgtataactagggtgtcaataccgcctttctgaaattttgctgtgtctcccttgattaatgaacggcactgtcatctttttttctccactaaatctcctacttttgtgaattgttggtgttggaagggctagttatctgcggggccaatgacaaccttttagaacctcttttttttattattctcttttccttccctagtatcaatgtcccgtgaaaaatacctttcatgatgtgttttgcaggccatcagtgtctcaggctgctagcatgcaaccgtgacaatgtgtgaaatgcgtgttgccccttttctccatcctgcagatgtatattgtcagaaaggcctgcctggggtatgttattttccccttttgtgcaaagttatagagtgtaatgaaatacttttaggttgttaatatgaatgtggt

SEQ ID NO: 86 - DNA, 6010 bp, Cordyceps militaris
gctgacctcccataatacaatatgtctggttaccaaggtggtcaccacgaccagtacgaccagggctacggccaggccggacatggcgatggatattaccaagatgatcagtactacgaccagggccacggcgaccacgctgcccagggcgatcacgctgcccagggcgaccacggcgcccagggtactcaaggtgacggctactatgatgaatccggctactatcacgccgatgccaacaacccatatcaccaggacggaggctactacgatgggcatgaccaataccaggacgactactacaacaataaccagggttactatgatggcgagtacaaccaaggctacgctcaaggtggtcgccacccatccgaagaagaatccgagacattcagtgatttcacgatgaggtctgacatggctcgcgccgccgaaatggattactatggccgtggcgatgagcaatacaacggatatggagaaggtggccgtggttatcgcccaccgtcctcgcagctgtcttacgggggtaataggtcgtccggtgcctcgactcccaactacggcatggaatacggcaacggcctcgcaagccagcgctccaaggaaccataccctgcttggacatctgacgctcaaatcccactttcaaaggaagagatcgaggatattttccttgatctaacgtcgaaatacggattccaaagagatagcatgcgcaacatgtacgaccaccttatgacacttctggactcgagagcttctcgcatgacacctaaccaggcgctcctgtccctccatgccgactacattggaggtgacaatgccaactatcgcaaatggtattttgctgcccacctcgaccttgacgatgctgttggcttcgcaatgcctctactcaatgagatcagaaagcgcaaggccaagaagggcaaaaagaagggtggtcgaggctggaacaacgagtcggagaccctgcaagaactcgaaggtgatgatagtcttgaagcccggaagtatcgctggaagacacgcatgaaccgtatgtctcagtacgatcgcgttcgccaaatcgcactttacctgctgtgctggggcgaagccaatcaggtccgattcatgccagagtgcctttgctttatcttcaaatgcgcagacgactatctcaattcaccggcttgccaggctcttgtggagccagttgaggagttcacgttcctcaacaacgtcatcacaccactgtatcaatactgtcgtgaccagggatatgagattctcaacggcgtctacgttcgccgagaacgtgaccacaagcacattatcggctatgatgattgcaatcagctgttttggtaccctgaaggtatcgaacgtatcgttctcgaagacaagagtaaacttgtcgatttaccccctgctgaacgctaccttaagttgaaggaggtgaactggaagaagtgtttcttcaaaacatacaaggaatcacgctcgtggttccacttgttactcaatttcaaccgtatctgggtcatacatctgaccatgttctggttctacacgtcacacaacgctccgtcgctcatcacctaccaatacgagcagcagaaggacaaccaaccaccagcctccaagcaattttcgattgttggctttggtggagctattgcatcactgattcaaatttttgcgacgctggctgagtgggtgtatgttccacgccgttgggccggagcgcagcatctcacgaaacggctactgtttttaattgtcatcctcgttctcaacgtcgcaccaggtgtcaaggttttcatgtttcacggtaacaaagatgggaaagacgccgaccagaagaacaaagacacacctatcgacaaggctatcggcattgtccactttgtcatcgcagtctttacgtttttgttcttctcggttatgcctcttggcggcctcctcggcagctatctgacaaaaaagtcacgacgttatgtggctagccagacttttacagccagttaccctcgcctgactggcaatgacatggccatgtcatttggtttgtggctgaccgtgttcggagcgaagtttggcgaatcttatgtatacctcactctttcattccgtgatccaattcgatatctgtccatcatgaagattgactgcttgggcgatgcgatgttcggaagcacggcggcgacgcagcagatactgtgcaagcaccagcctacaattgttctcattctcatgacgttcaccgatctgatcttcttcttcctggacacctatcttttctatgtcatcttgaataccgtgttctccattgcacgctctttttacatcggctcatcgatctggacgccatggcgaaatatcttttcgagactgccaaagcgtatttactccaaggtgctcgcgacgactgatatggagatcaaatacaaacccaaggtcctcatctcccaagtctggaatgccatcgtcatttcaatgtatcgcgagcatcttctcgcaatcgaccatgtgcagaagctgttgtatcaccaggtgccctctgagcaggaaggcaaacggacattacgcgctccgaccttcttcgtttcccaggaagaccactcgttcaaaacagaattctttcccagccacagtgaagctgagcggcgcatctcattctttgcccagtctctctccacacctattcccgaacccgtccctgtcgataacatgcctacgttcacagtcatgatcccccattacagtgaaaagattctcctctctctgcgagaaatcattcgtgaagacgagccctactcccgtgtgacactcctggaatacctgaagcagcttcatccgcatgaatgggaatgctttgtcaaggacacaaagattttggcagatgaaacagctcagatgaatggcgaaccagagaagagcgaaaaagacacagcgaagagcaaaatcgacgatttgcctttttactgcattggtttcaagtcttctgccccggagtatactcttcgcacacgtatttgggcctctttgcgttcgcaaactttatatcgcacagtgtctggctttatgaactacagtcgtgccatcaagctcctgtatcgtgtcgagaatcccgaggttgttcagatgtttggtggaaactcagaaaagttggaacgagaactggagagaatggctcgacgcaagttcaagctcgttgtgtctatgcaacgctattccaaattcaagaaggaagagatggaaaatgccgaatttttactgcgcgcctatccggatcttcaaattgcttacctggatgaggagcctcctctagcagaaggcgaggaacctcgcctgtactccgcacttatcgacggtcactcagaactcatggagaatggtatgaggcgaccaaagttccgtgtccagctctctggtaacccggtattgggtgatggtaaatccgacaaccagaatcacgccatcatcttttaccgcggtgaatacattcagctcatcgacgccaaccaagacaactatctggaagaatgcctgaagattcgcagtgtcctcgcagagttcggggaaatgaagccagacaaccattccccttacacacccggagtcaagaacgatgtgcacactccagttgctattcttggtgctcgcgagtacattttctcggagaatattggtattctcggtgatgttgctgctggaaaagaacaaacatttggtaccctctttgcccgtactatggcacaggttggtggcaaacttcactacggccatcctgatttcctaaacggtatcttcatgacaacacgagggggtgtatcgaaggctcaaaagggactgcatctcaacgaagatattttcgcaggtatgaatgcacttgtccgcggtggacgcattaagcactgcgaatactaccagtgtggcaagggtcgtgatcttggatttggttctattctcaatttcacgaccaagattggcaccggcatgggagaacaatggctctctcgggaatactactacctcggcactcaacttcctcttgacagatttctgtccttctactatgcacacgcgggcttccacgtcaacaacatgttcattatgctgtctgtccagtcatttatgctgacgctgatgtccattggcgcactgcgacacgaaacaatccgctgcgactacaatccacagaaaccaatcacggatcctctgtatcctacgaaatgctccaacacggacgagctgatgggctgggtctaccgttgcattatctctattttcttcgtcttcttcatctctttcgtgccgctcattgtccaagaattgaccgaacgaggtgtgtggcgtgcagctttgcgcttcattaaacagttttgctctctatctccgttcttcgaagtgttcgtctgtcagatttatgccaactcagtccagtcggatcttgcatttggtggcgctcgttatattggtactggtcgtggtttcgcaacggctcgtattccgtttggcgttttgtattcgcgatttgccggacagtcgatttatttcggtgcaagattactgatgatgctcctgttcgctacttccactgcctggcaacctgctctgacctacttctggatcgttctgcttggtctcatcatctcaccgttcctgtacaaccctcatcagtttgcctggaccgatttcttcatagattaccgtgacttccttcgatggctgtctcgaggcaattcgcgcgcacatgcttcttcctggatcatgttttgccggctctcccgtactcgcatcacgggatacaagcgcaaagtcatgggcgatgcttctgccaagatgtctgctgacgttccccgcgcggctgtggccaacatcttcttgaccgagatcctcacgccattgctacttgctgccaccaccacggttgcttacctattcgtcaatgcacagaccggtgttacagacaatgacaagaactcgagttcctcgcctggctttaagattgggcctatcggcgcattgattcgattggctgtcgtggcttttgcgcctatcggcatcaacgccggcgttcttgcagccatgtttggaatggcttgttgtatgggaccagttctgaacatgtgttgcaagaagttcgggcctgttctcgctggtatcgcccacggcgcggctgcagtcttcatgattatcttcttcgaagttatgtatgttttggaaggattcaacttcgccagagctcttgcgggtatcatcgccgccatgtgcatccagcgtttcatttttaagctcattgtgtcactggcgttgaccagagagttcaagactgatcagtccaacattgccttctggaacggaaaatggtactcaatgggctggcactcagtatcccaaccggcccgagagtttttatgcaagattacggaactcagcatgttctctgctgatttcattctgggacattggattttattcatgatggctccgttgattttgatcccgcagattgataagatccattccatgatgctcttctggttgctgcctagtcgtcagattcgcccacccatctactccatgaagcagtcaaagcttcggcgtagacgtgttattcgatttgccattctttactttgttctcttcatcattttcctggcgctcgttgttgctccaggcgtcattggcaagaagttccttggcgatacaatcttcaaagctctggataatggcaacggcggccccgccaatttgcaccttctgcagccgtggggactggacaacaacaacactgaaggcaagactgaaactggcaccaaggctggtggtgctgatgcatctgccacagatgcctcgaagctgcgtcttattctaagcttgaaacgccacacgcatcgatttgaaaagccaccatgttctgggaaatcacaaaccattgtaccgattattagattgtttctgttattattttgatccattttgtctcggatagggttaatacagaagttttggttgg

SEQ ID NO: 87 - DNA, 5646 bp, Debaryomyces hansenii
atgtcgtataacgataataatcataattactatgatccgaatcaacacggggctgctggggacgaaggttattaccagcaacaaccgtatgatgatttgaatcagcctcaacaagactattatgatcctaatgttcaatatcaacagcaaccgtatgatatggacggatatcaggatcaattcaccggaggtcagcagcttcctggccaacctgttggtggctacaatgcagaccctgaagccttttctgacttcagttatggtggacaaacccctggcactcctgggtacgatcaatatggtacacaatacaccccatcacaaatgagttacggtggcccaagatcatccggtgcctctactcctatctacggtggtggcatgggtagctacgatccaacccaattccaaatgtcctctagtttgccttacccagcttggtctgctgatcctcaggctcctataaagatcgagcacgttgaagatatcttcattgacttagccaataaattcgggttccaaagagattctatgagaaacatgttcgattacttcatgactttgttagattccaggtcttcaagaatgtcaccagcgcaagctttattaagtttacatgctgactatattggtggtgataatgcgaattataaaaagtggttttttgcctctcaacaggatttagacgatgctattggtttcagcaatatgacgttgggtaaagtcggtaagaaagctagaaaagcttctaagaagtccaagaaggctagaaaagctgtcgaagagcatggtcaagacatggatgcattagcgaatgaattggaaggtgattattccttagatgctgcagaaatcagatggagagctaagatgaacggattatctcctgaagaaagagtcagggatattgccttatacttgttgttatggggtgaagctaaccaagttcgttttactccagaaactatttgttacatttataagactgcttttgattatttaatgtcgcctcaatgtcagcaaagacaagaaccagttcccgaaggtgattatttgaatcgtgttattacgcctttgtatagattcatcagatcccaagtctatgaaatttatgaaggtaggtttgttaaacgtgaaaaggatcacaataaagttattggttacgatgatgtcaatcaattattttggtacccagaaggtatttctagaattatttgcgaagacggttctagattagttgatattcctcaagaagaacgttatttaaaattgggtgaaattgaatggtcaaatgttttcttcaagacatataaggaaattagaacatggttacatttgttaaccaattacaatagaatctgggttattcatggtactgtttactggatgtacacagcctacaattccccaactttatatacgaagaattatgctcagccattaaacaaccagcctactgcatcctctagatgggcatctgctgctatcggaggtgttcttgcttcgtttattcaaattatggctactgtttgcgaatggttatttgtcccaagagaatgggcaggtgctcaacatttaacccgtcgtttacttttcttaattattattttcattgttaatttggttccagttgtgtttactttctattatgcgggcttacaaaccgtttcaaaggcggcacatgctgtgtctatcgttggtttctttatcgctattgccacgttaattttctttgctattatgcctttgggtggtttatttacgtcgtacatgaataagagatcaagaaaatatttggcgtctcaaactttcacggcaaacttcaataagttaagagggttagacatgtggatgtcttatttggtatgggttgctgttttcgctgcaaagtttgcagaatcttatttcttcttaacgttgtccatcagagatccaattagaattttatcaacaactactatgagatgtactggtgaagtttggtttaaaaacgaattatgtaaacatcaggctaaaattgtcttaggtttgatttatgcggttgatttgttattattcttcttagatacctacatgtggtggattattgttaactgtatcttttcggttggtcgttcattctacttgggtatctctatattgaccccatggagaaacattttcacaagattgccgaagagaatttactcaaagattttggctactactgaaatggaaatcaagtataaaccaaaggttttaatttctcaaatctggaatgctattgtcatttccatgtacagggaacatttattagctattgatcacgtccaaaagttattatatcatcaggttccttctgaagtagaaggtaagcgtactttgagagctccaacctttttcgtatcccaggatgataataactttgatactgaatttttccctagaaattccgaggcggaaagacgtatttctttctttgctcagtcattggctactccaatcttggaaccattacctgttgataatatgccaactttcaccgtatttactcctcattattctgaaaaaattttattgtccttgagagaaattatcagagaagacgaccaattttcaagagttaccttgttagaatatttaaaacaattacacccagtcgaatgggaatgctttgttaaggatacaaaaattttagccgaagagactgcagcctatgagaacggcgatgatccagagaagttatctgaagatggattgaagtctaaaattgacgacttaccattctattgtattggtttcaaatctgctgcacctgaatataccttaagaacccgtatctgggcatctttgagatctcaaactttataccgtactgtgtcaggatttatgaattacgctagagctattaaattattgtaccgtgttgaaaatccagaattggttcagtattttggaggcgatccagaaggcttggaattagcattagaaaagatggctagaagaaagttcagattcattgtttctatgcaaagattagctaagttcaaagatgatgaaatggaaaatgcggaattcttattgagagcttatccagatttacaaattgcctacttggacgaagaaccagccttgaatgaagacgaagaaccaagagtatactctgctttgattgatggtcattgtgagatgttagaaaatggtagacgtcgtcctaagtttagagttcaattatctggtaatccaattttaggtgatggtaaagctgataatcaaaatcacgctcttattttccaccgtggtgaatatattcaattgattgatgctaatcaagacaactacttggaagagtgtttgaagattagatctgtgttgtctgaattcgaagaattgaatgttgaacatgttaacccatacgcgccaaacttgaagaatgatgaaaatggttcgccaacgacgcctgtcgctattttaggtgctcgtgaatatattttctctgaaaattcaggtgttttaggtgatgtggctgctggtaaagaacaaacatttggtacgttattcgcaagaactttagctcaaattggtggtaagttacattatggtcatcctgatttcttgaatgctaccttcatgttcactagaggtggtgttgccaaggcacaaaagggattacatttaaatgaagatatttatgctggtatgactgctatcatgagaggtggtcggatcaaacattgtgaatactatcaatgtggtaaaggtagagatatgggttttggttctattttgaatttcacaactaagattggtgctggtatgggtgaacaaatgttgtctcgtgaatactactacttgtccactcagttgccattagatcgtttcttatcgttctactatggtcatccaggtttccacattaataatatgtttattcaattgtcattacaagttttcatgttggttttagctaacttgaattctttagcccatgagtccaccttctgtatctatgataagaacaagccagttacagaccttttgcttccatatggttgttacaattttgaccctgctgttgattggattagacgttatactttgtctatttttattgttttcttcatttctttcattcccttaattgtccaagagttaattgaaagaggtgtatggaaagcgacgcaaagatttgttcgtcatatcctttctttgtccccaatgttcgaagttttcgttgctcaaatttattcttcatcgttattcactgacttaacagttggtggtgctagatacatctccaccggtagaggttttgctacttcgcgtattccattttcaatattatattcacgttttgctgattcatctatttacctaggtgcaagatcaatgttgattattgtatttggttccgtttctcactggcaagcaccattattatggttctgggcatcattgtcttcgttaatgttctcaccatttattttcaacccccatcaatttgcgtgggaagatttcttcattgattaccgtgattttattagatggttatctcgtggtaacaccaaatggcacagaaactcatggattggttatgttcgtctttcaagatcacgtattactggtttcaagcgtaagttaattggtgatgattccgagaagagcgctggtgatgctacaagagctcatagatcgaatgttttcttcgctgatttcttgccatgcttgatttatacggctggtttgtttgttgcttacactttcattaatgcccaaacaggtgtttatgaagatccacaggaagtcaattctgtattaagacttgttatctgtgctttagcccctgttgtcattgatcttggatgtttggctgtttgtcttggtatggcttgttgtgcaggtccattattgggtatgtgttgtaagaaaactggtgctgttattgctggtgtcgcacacggtgtcgcagttattgtcaacttaattttctttgtcgtcatgtgggttttagaaggtttcgttttcgcaaaaatgttgttaggtgttattactatgatttacattcaaagattattatttaaattcttaaccttatgtttcttgacaagagaatttaagaatgacaaagctaacactgccttctggactggtaagtggtatggttctggtttaggttacatggcctggactcagccagctcgtgaattctgtgcaaagaccattgaaatgtctgaatttgcaggtgactttatcttggctcatatcatcttattctgtcaattgccaattttatgtattccattaattgatagatggcattctactatgttgttctggttaaaaccttcaaggttgatcagacctccaatttattcattaaagcaagctagattgagaaagagaatggttagaaagtactgtactttatattttgctgtattgattttgtttgttattgttatagttgggccagctgttgcttctggagcaatagataatattgagccttctgggttgcaggatggtcctttcaaaggtttgttccaaccaagacacaaggacaacaacgatacaggcaaaagaggcagcagctatgccagtactacatacacttattacagttacacaccaaagacccaaaagactgccttctcaactaaagcttaa

SEQ ID NO: 88 - DNA, 6706 bp, Emericella nidulans
agtctgattttcctgttggacaatcagttccctttccactctcgctgaccgtccaactaacttgtctgctccctcccttcgtccttctcttagtttcctttctttcttttcgaggcttcactttttcttcagttgcttttgagtcccagtccgctctttttcatcgtttgtactcggaagcttatcgaccacggaccgtactccccttccttccttgtgcctgttgttcggggaaagaagaggaggcgaggctgcggtgccccttcctgttgggtcaaaagagtttcctctcgttatcttccatcatcattcgtttgacaatttttcagaatcgatcgagaacctcttcgagtagaagaggacaaaagaatccttcacgaatcgtcgcttttcgattgggcttgataatactacaaggttgacggacaggtccggtgccttcgagcgatcgccaactccgactgttttcacgaagcgcctagtgcatgatctttagattcgctcgtctataaccgctgatttgttctgtcgatgctataattactgaagcttgatcggactaatatttaatgggcctttgtttctgtgagtttggttgtcttgttacttgcattttttgggttcagaactaacagcaacaagagaacctcggtgattgtcgcttgtcataatgtcgggctacccacaaggttcgggctatcagcacggcaactacgatgatggctatgaccatcagggtcatggcgatgcttactatcaagatgaccaccatgctcaagctggttattatgataaccaagactatggggatggctactacgatagagggtaacttccctttattctaaagacatgcctcgcatttgtgctgattttttttttagtggctacggggatcatggctaccagcatgatggctactacgatgcgggccaccacgatgactactacggcgatcagtattacgcccagggaggtcaaggcagaggacgacatggtcgtgactccgaggaagagtcggagacctttagtgatttcactatgaggtctgaaacagcccgtgctgccgacatggactactatgggcgcggggacgaacggtacaacagttacactgatagccagtacggacacggaggctacggttaccgccccccttcttcgcaggtgtcgtacggtggtaaccggtcttctggagcgtcgacaccagtgtatggaatggattacggcaatggcttgcctgcaggccagcgatcccgagagccataccctgcctgggcttccgatggccaagttccggtttcaaaggaggagatcgaagacattttcattgaccttgtcaacaaattcggttttcagcgggacagcatgcgcaacatgtacgaccatctaatgacccagttggactcccgtgcctcccgcatgactcctaaccaggcgctcctctcccttcatgcggactacattggtggtgacaatgccaactaccgccgttggtacttcgccgcccatttagatctcgacgatgcggttggttttgccaacatgaaactgggtaaagcagaccgcaaaacaagaaaagctcgtaaggctgcgaagaagaaggcacaagaaaatccagaggacgtcgaaggaacgctcgaggcgctggaaggcgacaatagcctagaggccgctgaatacaggtggaagacacggatgaaccgtatgtctcagcatgaaagggtgcgccaattggcactgtacctactctgttggggcgaggccaaccaagtccggtttttgcccgaggctctttgctttatcttcaaatgtgccgacgacttttacaactcgcccgagtgccagaaccgagtggaacctgttgaagagttcacatatctcaatgagatcatcactcctctgtatcagtattgccgtgaccagggttatgagattttggatggcaagtatgttcgccgtgagcgtgatcataaccagatcattggatatgatgacatgaatcagctcttctggtacccagagggaattgagcgtatcgtgctggaggacaagacccgcctcgttgacattcccactgcagaaaggtggaccaagctcaaggaggtgaactggaagaaggtcttcttcaagacttacaaggagacacgttcctggttccatctggttacaaacttcaaccgtatctgggtcatccatctgggtgctttctggtttttcaccgcgtataacgcccctaccatttacactaagaactacagacagcagctcaacaacaaaccaccaggagcttactactggtctgctgttggttttggtggagctttggtctcattcatccagatcatggcgactatctttgaatggatgtatgttcctcgacgttgggcgggtgctcagcatcttaccaaacgcctgctcttcttgctcttggttttcgtcatcaacctggcccctggtgttgttgtcttcggattttcatcggtgcttcctggcaaggttccgcttgtcgttggtatcgtccatttcttcatcgccctcgccacatttttcttcttctccatcatgccacttggtggcttatttggcagttacctgaagaaacacggccgccagtacgttgccagtcagacgttcactgccagttttccgaggctgaaaggaaatgatatgtggatgtcatatggactttgggtctgtgtttttggtgcgaaattggccgagtcatacttcttcttgaccttgtccatcaaagatcccattcggtacttatcgccataccacgttcaccaatgcgcgggtgtcaagtacattggagacaagatctgctactaccagccccagattcttcttggactaatgttctttatggatctgacgctcttcttcctcgacagttatctctggtacattatttgcaacaccattttctcagtcgctagatcgttctaccttggtgtctctatttggtctccctggcgaaacatcttttcgcgtctcccgaaacgtatctactcaaaagtccttgcgaccacggatatggagatcaagtacaagccaaaggttttgatctcacaagtttggaacgcaataattatctccatgtacagggagcaccttctcgccatcgaccacgtccagaagctactctatcatcaagtgccgtccgagcaagaaggcaagcgaacccttcgagcacccaccttcttcgtttcccaggaagaccagtcattcaagactgaatttttcccacgtggtagcgaagcagagcgccgtatttcgttctttgcccagtcgctgtccaccccgatgcctgagccgctgcctgttgacaacatgcctaccttcaccgttttgattcctcattacagcgaaaagatccttctctctttgcgtgagatcattcgcgaggatgagccttactcccgtgtgactctcctggagtacttgaagcagcttcatccccatgagtgggactgtttcgttaaggacactaagattctggcggacgagacctctcagttcaatggagactacgaaaagaacgagaaggacgcggccaagagcaagattgatgacttgccattctactgtatcggtttcaagtctgctgctcccgagtacacgcttcgcacccgtatttggtcctcgctgcgttcgcaaactctttacagaactgtatccgggatgatgaactatagcagagctatcaagctcctctaccgtgtggagaacccggaagtcgtccagatgttcggtggtaattctgagaagctggaacatgagctcgagaggatggcccgtcgcaagttcaagatctgtgtttcaatgcagcggtatgccaaattcacaaaagaagaacgtgagaacacagagttcctcctccgagcctaccccgacctgcagattgcctatctcgatgaggaacctccagccaacgagggtgaagagccgcgtctctactctgctttgattgatggacactgtgagctgctcgagaatggcatgcggaagcccaagttcaggatccagctctccggaaacccgatccttggtgacggcaagtctgacaaccaaaaccactcgatcattttctaccgcggtgaatacattcaggtcattgatgccaaccaagacaactatctcgaagagtgcttgaaaatccgaagcgttcttgctgagtttgaggaattgaccaccgacaatgtctcgccttacactcctggcgttgcctcttcctctgaagctcctgttgctatccttggtgcccgtgaatacattttctcagagaacattggtgtacttggtgacgttgccgccggtaaagaacagacatttggtaccctgtttgctcgtactcttgctcagattggcggaaagctccattatggtcaccctgatttcctgaatggtatcttcatgactaccagaggtggtatctccaaggctcaaaaaggtctacaccttaacgaggatatctacgctggtatgaacgccatggttcgtggtggccgcatcaagcactgcgagtacttccagtgtggtaagggtcgtgatcttggtttcggttccattcttaatttcaccactaagattggcactggtatgggtgagcaaatgctatcaagagagtactactacttgggtactcaactgccactcgaccgattcctgtccttttactatgctcaccctggattccacatcaacaacatgtttattatgttgtctgtgcaaatgttcatgattgttctgatcaacctgggggccctgaagcacgaaaccatcaactgcaactacaactccgacctgcccattaccgatccacttatgccaacgttctgcgcgcctctcactcctatcatcaactgggtcaaccgctgtgttatttcgattttcatcgttttcttcatttcgtttgttcctttggctgttcaagaattgactgaaagaggactctggcgtatggcaacgcgtctggccaaacatttcggatctttctccttcatgttcgaggtgtttgtttgtcaaatctattccaacgctgtgcaccaaaacttgtctttcggtggagcgcgctacatcgctaccggtcgtggtttcgcaactgctcgtatcccattcggcgttctgtactctcggtttgcgggaccttcaatttacaccggtttccgtctgctgatcatgctgctcttctcaacctcaactacctggactgcctctctcatttggttctgggtctctcttctcgccctttgcatctccccattccttttcaaccctcaccagtttgcctggaacgacttcttcatcgattaccgtgactacatccgatggctttcgcgcggtaactctcgctcacacgcatcctcatggattggcttctgccgtttgtcgcgtactcggatcactggttacaagcgcaagcttctcggtgtgccgtcggagaaaggatcaggtgacgttcccagagctcgtattaccaacattttcttcagcgaaattgtcgctcctctagtcctcgttgctgttaccctcgttccatacctctacatcaattctcggactggtgtgagcgctgatgtggacgggggcaatgaccctcacgatgccattttgcgtattgccattgtagcatttggacctattggtatcaatgccggtgttgctgctgttttctttggtatggcatgctgcatgggtcccatcctgagcatgtgctgcaagaagttcggtgctgtgttggcggctattgcccacgcgattgctgtgatcatcttgcttgtcatctttgaagtcatgttcttcctcgaacactggtcttggccccggtgcgtcatgggcatgatcgccatggctgccattcaacgtttcgtctacaaacttattatcgcgctcgctcttacccgagagttcaagcatgaccagtcgaacatcgcatggtggactggaaaatggtacaacatgggttggcactctctctctcaaccgggccgagagttcctctgcaagatcacggagttgggctatttctcagcagacttcgtcattggtcatctcctattgttcattatgctgcccgctctttgtgttccttacattgacaagtttcactcagtcattctcttttggctccgcccaaggtaagacccctcatttactcggttgtggattcctaatctctaacactcaaatctagtcggcaaattcgccctccaatctactcgcttaagcagtccaagcttcgtaagcgacgtgtggtccgtttcgctattctgtatttcgccatgcttatcctgttcctcgttctccttattgcacccctcattgccagaaatcaggatctgaacctgaaaatgagtggcatccttcttgagctcatgcagcctctcgacagcaacaacaacgacactatgaccagctataccggctcgggtgtccccaagggcatggagcctattgcgtccccgtcatcgtaccttacgaacttaaacaactaaaggctgtcttgtttcgtcaaactacattctgctacaatattctgatatggaacatgggaacaagatgtataaagtatccggcgcgttgatgttgctgttgagcccgtcaattatgtttcttatttccatattattctcctcaacggaatctctacttgtacggttcctgtgagattcaatggatgcaatatctatcggcttgtttt

SEQ ID NO: 89 - DNA, 6706 bp, Emericella nidulans; identical to SEQ ID NO: 88

SEQ ID NO: 90 - DNA, 6909 bp, Exophiala dermatitidis
ggcgactagcatgccggcgcttggagctgcgggcgggggcggcagctctagaactagaggatcccccggactgcaagaattccatatctttcttatcgataccggccacggctcgggctgccgtgaggattagctctgccggtgcattggctgagcaaccaacgctctcccccttcattggaggcccagcaaccaccaccgccacaccagcattctcttcacctgcgattttgacgtttgttgctaatcgcctacccgccaccgtgctgttcaacctcacgatggatgctggggcagcttgccggtagttctaagcaacgtttttcaccatcatttccctcggcgctcctcctaggaagacattcgctgctcataactgcctcatcgcataatatcaccactacttcaaaaaccacagatcttgtatagtcaaaagaggctggttgatgggactgttttaaggtatgttgcaggaaaagggcgttcgacgaactccaaggagctacgggcctcttgaaaaatgacggctgctaacactgcgaccctttagaaatctcgctcaacatgtctggtcatcctccaccccagcagggtcagcatgacgatggctatggccagcaaccgcacggtaacgatgcctattatcaagatgacaatgggtaccatgatcaatatgactatggtcacaatcaatatggcgaaggctattatgatgaatcgtaagatcgtcattcactctatttaacaatgcttggctaactcggatgtgcagtggctactacaacgcagatgcctcgaacccctaccacaacgacggcggttactatgaaggtcaccaaggctaccaagacgattactacgacggccagtattatgatcaaggagctgcaggccagcaacaataccaaggtggtcaacgcccaagacgccgtggtcaggattccgaggaagattccgagactttcagcgatttcaccatgagatcggacatggctcgggccgccgaaatggattactacggccggggcgacgagcgataccatagcggttatgaaggacagggaggccgtggctacagaccgccctcttcacagatctcatatggtggtaaccgatcttctggtgcctcgaccccgatctacggcatggattacaacagcactctgcctgctggccaacgctcccgcgagccctacccagcctggacttcggatgcgcagattcccttgtcaaaggaggagattgaggacattttcctcgatctcacagccaaattcggcttccaacgggacagcatgcgtaacatgtacgatcacatgatgacactccttgactcgagagcttctcgcatgacgcctaaccaggccttgttgtctttgcatgccgactacatcggaggtgacaacgccaactaccgcaggtggtactttgcggctcatctggacctcgacgacgcagtcgggttcgccaacatgaaactcggaaaggccaatcgtcgaactcgcaaggcacgaaaggccgccgccaaaaaggcaaaagagaacccagaaaacgaagaacaagttctggaagccatggaaggggataattcccttgaggctgctgaataccgctggaagacgcgcatgaacaagatgtcccagcatgatcgcgctcggcaaattgcgctttacctgctttgctggggtgaggccaaccaagtccgtttcatgcctgagactctttgtttcatcttcaaatgcgcggatgattacctccactcccctgcttgccagaaccgcgtggagccggtcgaagagttcacctatctgaacaacgtcatcacgccgttgtacagctacatcagagatcagtgctacgagatcatcgacggcaagtatgttcggcgcgagaaggaccacaacaaggtcattgggtatgacgatatcaaccagctattctggtaccctgagggtattgagagaattgtcctcgaagacaaaactcggctcgttgatctgcctcctgccgaaagatatctgaagcttcacgaggtgaactggaagaaggtctttttcaagacgtacaaggagaccagatcctggttccacttggtcgtcaacttcaaccgtatctgggtcatccacttgacagctttctggttctacacggctttcaactccccaacactgtacacccacaagtatcagcagcagctcaacaacaaaccacacgctgctgctcagtggtctgctgttggattgggtggtacggtggcgacattgatccagattattgcaactctatgtgaatggtcgtatgtgccccgaagatgggctggcgctcagcacctaacgaaacgactcctcttcctgcttggtgtcttcgttatcaatatcgcgcccagcgtctacattttcggattcagccagacgtcaaaaattgctctgatcctcggtgttgtccagttcctcgttgctctggctacgttcttcttcttctcgatcatgccacttggtgggctgtttggaagctatctcacaaggaactctcgccgctatgttgccagtcagaccttcacggcttcttacccccggttgagaggcaacgacatgtggatgtcttatggcctttggatcatgattttcgctgcaaagttctcggaatcgtacttcttcctgacgctgtcattccgagatccgatcaagatcctgtcttacaccaaaatccgccactgccagggtgatgccattctcaagacgtacctctgcaagtaccaaccacagattctgcttggcatcatgtttttcaccgatttgatcctgttcttcttggatacctatttgtggtacatcatttggaacacggtcttttcagtggcgcggtctttctatcttggtgtttccatctggtcgccatggcgaaatatcttctcgcgactgcccaagcgtatctactcgaaaatccttgccacgactgacatggagatcaaatacaagccaaaggtgctgatctcgcaagtgtggaacgctattgtcatctctatgtaccgagaacatctcttggccatcgaccatgtgcaaaagctcttgtaccaccaagtgccgtcagaacaggagggtaagcgcacccttcgtgccccgaccttcttcgtgtcacaagaggatcactccttcaagaccgagttcttcccagctcagagtgaggccgaacgtcgtatctctttcttcgcgcagtctctctccacgcctataccagagccgctgcccgtggacaacatgccaactttcaccgtcctcattcctcactacagcgagaagatcctcctctcattgcgcgaaatcattcgcgaggatgagccatactctcgtgtcacacttctagagtacctgaagcagcttcatccgcatgaatgggactgcttcgtcaaggataccaagattcttgcggatgagacctcccagttcaatggcgactacgagaagtccgagaaggataccgcaaagagcaagattgatgatttgccgttctactgcatcggtttcaagtctgctgctcccgagtacacacttcgaactcgtatttgggcttcactgcgttctcagactctctaccgaacgatctccggtttcatgaactacagcagagccatcaaactgttgtaccgtgtcgaaaatcctgaggtggttcaaatgttcggtggtaactctgacaagcttgagcgcgaactcgaacgcatggctcgccggaagttcaaaattgtagtgtcgatgcagcgttatgccaagttcaagaaggaggaacgcgaaaacaccgaattcttgctccgcgcctatcccgacttgcagatcgcctacttggatgaagaacccccgcagaatgaaggcgaggagccacgactctactctgctcttattgatggccactcggaactcctcgacaatggcatgcgacgaccgaagttccgcgttcagctttctggcaatcctatccttggtgacggcaaatctgataaccaaaaccatgccatcatcttctaccgtggcgaatacatccagcttatcgatgctaaccaggacaattacctggaggagtgcctgaagatccgaagcgtgttggccgagttcgaggaaatgaccacagataatgtctcaccatacactcctggaatcagtcaagccaaggccaaccctgttgctattgtcggtgctcgcgagtacatcttctccgaaaacatcggtgtccttggtgacgtcgctgctggtaaggaacagacttttggcacgctctttgctcgtaccctggcgcaaattggcggcaagctccattacggccatcctgatttcctcaacggcattttcatgaccactcgcggcggtgtttccaaagctcagaaaggccttcacctcaacgaagatatctacgcgggtatgaacgctctgatccgtggcggacgtataaagcactgtgaatactaccagtgtggcaaaggtcgtgatcttggctttggctccatcctcaacttcactaccaagattggtaccggtatgggtgaacagatgttgtctcgagagtattactacctcggaactcaactcccactggaccgcttcttgtcattctactacgcccatcccggtttccacatcaataacatgttcatcatgttgtctgtgcagatgtttatgatcgttctgatcaacctgggagcgctgaggcacgagaccatcgtttgtcactacaaccgcaatgtgccagccaccgatccgctgaagcctactggttgcacgaacctgacgccaattatggactgggtcgagcgctgcattgtatccatctttatcgtcttcttcatctccttcgtcccgttggttgtacaagaattgactgaacgtggattctggcgcgcggctactcgtctggctaagcactttgcctcagcctcgccaatctttgaggtgtttgtctgtcaaatttacgccagctcgattcaacaggatctctcctttggcggcgctcgttacatcggtactggtcgtggtttcgccaccgcccgtattccgttcggagttctgtactcgcgcttcgctgggccttcgatctacctgggtgctcggtcgttgatgatgttgctgttcgcaaccatcacggtctggggaggatggttcctgtggttctggttctctctattgggtctctgcatctcgcctttcatattcaaccctcaccagtttgcctggaacgacttcttcatcgattaccgagactacttgcgatggctctcccgtggcaattcgcgttcgcacgcttcttcctggattgccttctgcagactgtcgcgtacgcgtctgacaggattcaagcgcaaggcccttggctctccgtctgagaagctatctggagatgttcctcgggcacacttcactagcttcttcttcagcgagatcgtgggccccttcgtgctcgtttgcctcacgctgattccctatctcttcgtcaatgcgcaaacaggtgtcactgccgacgtcaagccggccacgaactctcttatccgtgtggcaatcgtggcgtttggccccattgctgtcaatgctggtgtgcttgccggtttgttcggcatggcttgctgtatgggtcccgtcctgagcatgtgctgcaagaagttcggatctgttcttgctgccatcgcacacgccgtcgcagtcatcatgctctttgctttctgggaggtcatgttcttcctcgagggatggatcttcgccaaggcactactgggcatgattgccgtggtcgcgatccagcggttcgtgtacaaactgattattgctctttgcttgacccgagaattcaagcacgattcgtccaacatagcttggtggactggcaaatggtactcgatgggttggcactcgatgtcgcaaccggggcgcgaatatctctgcaagatcacggagctcggattcttcgccgccgatttcatccttggacacaccatcttgttcatcctcttgccagccctctgcgttccttacatcgacaaattccactcggtgatgctcttctggctgcgtcccaggtatgtgatttcctttcctggcaccttcagtgcaaaatgctaacaaaaatcaatagccgccaaattcgtccaccgatctattccatcaagcagtctcgtttgcgcaagaggcgtgtcattcgctacgccatgttgtacttcctcatcctcattgtgttcattgtcctcgtcgttggacccgtcattgtgcgcaagtacatcaagggtctccctagcatcccgatgaaactgcttcagcccactggacaaaacaacaacgacacaatgaccggcatcaccggttctgctctcctcaatttcggacaagatgctacggccgccggtacggatgccgccgctgcagctgccaccacctcgtcagactccaacgatcctttcagctttggaggtggcaggttcgttcgatggtaaataccgcgagcttaactgcgaagcggtgccagtatacattgctgcgaagaggagttgcatgacacggcagaaacggtggaagatctgtcgttggaacgtggcagggagcagcaccccatgacaagtaatgaacgaaacggcatagacgagcagcctttcacaaaacagataggtgcttttgcagcagggtctttattctttactgtgcactgtgcatcatgggagtggcgctgagtgatggaacatggtttactttgtgttcgtagaatagcgtactgtacatgaagcatggttcaatttgccaaagtcgcaacgatgaacctccactctctggagccggtctgcctctctgatatgtaccttaactacttagtacgtcctggttaagagtatctgttctgagctcgatgggaagcgcctcagaagaagtgaacagtcttctc

SEQ ID NO: 91 - DNA, 8023 bp, Filobasidiella neoformans
ctgcagtgagctccctgattagcttttacagggtcataccatcccccagaagagtaatagcaaactacattcaccggaccatattgggttcattttgagccgcacgctgactaagacaaccaacggggacgccgaggaagccggcacggtggatcaatcgttacgtgataagactggatgtcatcttaccaagcagccaaatgcgccttacgaagcagcagacgaatgtgtcttaccaagcagccaaatagtttcttctctgcctttactttgatatttcgataattcaggcgcggatttgcactacggtactggtttatcaggtaatcaaccgaagcttctttcgaatttagggtacgttggctcgcgagagcgagtttgttgtatgttttgccttctagcttcgatggatgtaaagcgagtggatactttgatgccatgcttaccgttccatcgttcgtccttgttggttgagcgaggaaggagtatgatggtattaacccctcatcattgtgcttgtagatgggagggtgctaacaacagtccaggcagcaggtacatagcaaaggttctaaatggtctactttcagggacacttgtttttaagtctagtggaaagggaaagtcgcggttgccaaggaagtgatggaaacctgtgttctgttgagacattggtcaaagacttgtaaatatgtttgttgggatcgtgatggataatcaatgatattctggctctgaccgcaactatgtaaaacgccactgaaagtggaacacgcatgacaagtagtaagtatacgtacaaaccgccgccttgggtgtacacccgacggccaacaatgcctctactattacccctttttgcccaacgttctgtcgaccaccccatgacaaaaatgccactctctaatcgccgaaactccgtggccaaaagcgatgacctatgacgtatgacgctgttcctctttttcagggtatccggcccattttcaaatggctgggccaggaaaaaaatgatttccggaagacttgccccctcaaacgcgacttttacttcccaaaacacggctgcaccctgaattccttgaacgaaaacgtaaaacagtaactgcctcgtgatttgagggtgcaattttccgagccgtccgttgttgatgggtttgattagaagaaaattagaaaatttacagattttctaatcattccctctcttttcttactatttttcttaatcacattcctaatctcagggtttctctcacgcgtagtcgcaaaggtctcgggaaggcgacagacatcgccttcctcttccacttctcatccacaacttgtacttccaactattatttcctactacattcactctttactctcacgatcccggacggagacgtctacagcttccgacgcccggtgtgacacgactgtacggcaacaccaaagactcgagccaagcgagcatctctccaatttcagtgctgtgcagaagacgtgtagagctatcgacaggaagagaggtgtaactgtaactgtaggtgagtggcgtttctacaaagtcgaggatccattgcaatagtggttgcgaagacctgtgaatacgctaccgtggtagcatttttcttcgcctgtgttgttttaccgagcgcactggcgtcctttgttttaccacacaacttttttaattgtcagcgctgacttgagactttctttagcgtcatgtcatatcccaatcccccgccaccgccgaaagggtctgcttcctttttcttcatcctcttccgatcctttcaaccaaaccaaccaacttccctacgactcccaattcccccctcaacatgctttcgcccatcccagtgcgccaaatcctggtgcgggtggtgctggcgtagctcctcccggacaggggggacagtatgctccgtattatgacaatgaacctgagatgggtggaaggtgggagggtggcggtatgggcagagagacttgggcgagcgagagtggatggagtcaaaatggtgagttgtttgtatatgggaagtgctgcggctgatcagatggtagaacccaactatcctccctcagattaccacggaggtcccggttacttgccgtctcgagcgtcgactccaacctttgaaggcagcaacgcgggacaccgacctcgtgacccttaccccgcttggactgttgatgccaacatcccattgtccaaggaagagattgaggacgttttgattgaccttgcaaacaagtttggtttccaaaaggactcttctcgaaatgtctacgactttctcatgatccaacttgactctcgtgcttctcgaatgtcccctaaccaagctcttcttactctccacgccgactacattggtggtgaacacgctaactaccgcaaatggtactttgctgctcaactcgacttggacgacgctatcggtgctgtgcagaaccctggtcttaaccgagtgcgttcagttgcccgacgtggcggcaagaccaagaaccctctcgctaccgcccaagaaaagtctctcgaatctgccacctctcgttggcgaacggctatgaacaatatgtctcagtacgatcgccttcgtcaagtcgctctttacttgctttgttggggtgaagccgctcaggtcaggttcatgcccgaatgtctttgtttcatctttaaatgtgcggatgattactatcgatctcccgaatgccaaaacaggcaagaagccgtccctgagggtctgtatttgagggctgttataaagcctctttaccgattcttgagggatcaggggtacgaggttgtggatggcaagttcttaagaagagagagagatcatgataaggttatcgggtatgacgatgtgaatcagttgttctggtatcctgaaggaatcagtcgaatcactttgaatgacaacgtgggtacttttgcttcatgctcgagctatactgactttccatctagacccgacttgtcgatattccacctgctcagcgattcatgaagtttgacagaatcgactggaacaaggttttcttcaagacataccttgagaagcgatccttcttccatcttttggtcaactttaaccgtatctgggttctccacatttccgtcttttggttcttcaccgcatacaacgccccttctatttatgctccatccggatcaacgacagcaacaacgccaatggcttggtctatgacgggtttaggtggtttcgtcgccactctcatcatgattgctgccactctagccgagtttagctacatccctaccacttggaacaacacttctcaccttactcgtcgccttatcttcctattaattattctcgctataaccggtggaccatcaatttatatcgcgttcttcaatcagacaggtcatgttgcattgattctcggtatcgtccaattcttctgttccgtcgtcgccaccatcgccttcgccactctgccctctggccgaatgtttggtgaccgtgtggccggcaagagcaggaagtatcttgcgaaccaaactttcaccgcgtcttatcccgctctcggcttctaccctcgtgtggcatctttcctcctttggttcctcgttttcggctgcaagttcaccgagtcctacttcttcttgactttgtctttccgtgacccaatgaaggtcatgaacggtatgaaggttcagaactgtcacgataagtacttcggcaatggtctgtgtacgaatcagcctgcttttgccctcgctgtcatgtttgtcatggacttgactctgttcttcttggatacctttttgtggtatgtcatttggaacactgtcttctctatcgccagaagctttgctatcggtatgagtatctggaccccttggaaggatatcttcgccaggctgcccaagaggatctatgccaaaatccttgctacggatgatatggaagtcaagtacaagccgaaggtcttggtctctcaagtctggaacgccgttatcatttccatgtaccgcgaacaccttctctcgatcgagcacgtccaaaaacttctttaccatcaaatccaatctgatcaacccggcaagcgtactcttcgagcgcccgctttctttatctctcagagcgagaaaggttccaaggccgagtttttccccaagggcagtgaagccgagcgacgaatctgtttctttgctcagtccctcaccacctccatccctgctcctattcctgttgatgctatgcctactttcactgtgcttgttcctcactattctgagaagatcttgctctctcttagggagattatcagggaagaggaccagaacacccgtgtcactttactggagtacttgaagcagctccaccctgtcgaatgggacaactttgtacgcgacacgaagatcctcgctgaagagtccgacgctttcaatggtggcaatcccttcgcgtctgatgagaaggaggaagccaagaaggccgatgacattccgttctacaccatcggtttcaagtctgccgctcccgaatacactcttcgtactcgaatttgggcttctcttcgtgctcagaccttgtaccgaactgtatctggtttcatgaactacagcaaggccatcaagcttctttaccgagttgaaaaccccgaggttgtccagctttttggtggcaacactgaccagctcgaaagggagcttgaaaggatggctcgacgaaaattcaagtttgtcgtttctatgcagcgatactcgaagttcaacaaggaagagcacgaaaacgcggaatttttgttacgtgcctaccccgacttgcagattgcctacctcgacgaggagcctcctcgcaaggacggcggcgagtctcgtatcttctctgccttgattgacggtcactctgaaataatgcctaacggtcgacgacgccccaagttccgtattgagcttcctggtaaccccattcttggtgacggtaaatctgataaccagaaccacgccattgttttctaccgaggcgagtacctccagctcatcgatgcgaaccaggacaactatctcgaagagtgtttgaagattcgaaacgtcctcggcgagtttgaggaattcaaggtatctacccaaagcccttacgctgcccagggtcacgccgactttgccaagttccccgttgccattttgggtgcccgagaatacattttctccgaaaacattggtatccttggtgacattgctgctggtaaagaacagactttcggtactcttgctgctagatctttatcctacatcggtggtaagctgcactacggtcaccccgatttcctcaacgctatctacatgaacactcgtggtggtgtttccaaggctcagaagggtttgcatcttaacgaagatatcttcgctggtatgcttgctttcggtcgaggtggtcgtatcaagcattccgaatactaccagtgtggtaagggtcgagatcttggttttggtactattctcaatttccagactaaaattggtactggtatgggcgaacaaatgctttcacgagagtattactacttgggcacccagcttccgatcgatagattcctgactttctattatggtcaccccggtttccacatcaacaacattttggtcatgatgtctgtccaagtcttcatgcttgctctcgtattcctcggtactcttaacaagcaacttaccgtctgcagatactcttctggtggtgacatccttcctggtcagagtggttgttacaaccttgtccctgtgttcaaatggatcaagaggtgtatcatctccatcttcatcgtgttctggatggcctttgttcctcttttcgtacaggaacttaccgaacggggtactggccgagctattctccgactgtgcaagcacttcttgtcgctttcgccagtcttcgaagtgttctccacccagatttacatgcactccatcctcaacgacttgactttcggtggtgccaggtatatcgccactggtcgtggtttcgctaccactcgaatttctttcagcattctctagtaagtgctgttcttttctgtgcgggccgtctactaacggtgagcagctcccgattcgctggaccttcgatctacctcggtatgcgtacccttgtcctccttctctttatcaccctcacagtctgggttcctcatcttatctacttctggattactgtcgtcggtctttgtgttgctcctttccttttcaaccctcaccagttcgccattgccgactttatcatcgactaccgagaattccttcgttggatgtctcgaggtaattcgcgaacacatgccaactcttgggtcggttactgtcggttgtcccgaactagggtcactggtttcaagcgcaagaggttgggtctccctagtgagaagttgtcgagtgatgtgcctagggctccctggaaggctattctgatcggagaaatcatcggccccatctgtttggctattctcttcgtgatctgttatctcttcatcaagagtttcgccgtggacggtcaaattcagcctggtttggtcaggattgcgatcatcgcccttggtcctattgtttggaacatggctcttttgattactctgtttttgatttctgtcttccttggcccttgtgtaagtctttcttttatcatttatcatgaactatagctaatgaccacctcacagctgaactcctacactcaccagtttggagctacaatggctgccctcgctcacttcggtgctgtcgctggtatgcttgtcttcttcgagctcctttggttccttgagctttggaacacttcccatgccgtcctcggtatcatcgctgtcatcagtgtgcagaggtgtatcttcaagttcctcatcgctgttttcttgtcgcgagagttcaagcacgacgaaaccaacagggcctggtggactgtacgtttgtatctaattgcccaggcttgagcatatattgacatttatttccagggtgtttggttcaaccgtggtttgggttctcacgcgctctctcagcccgcccgagagtttgttgtcaagacaatcgaaatgggcttgtactctgccgactttattgcctgccactgtaggtgtattggtcttcatctttcgtagtccccactgaccccacaactttagtgctcctcgccctccttaccatccccatgtttatcccttactttgaccgagttcacgctactatgctcttctggctcgcgcccaatcagcaaatcaggcctcctatttacagcttcaggcagaggagccaacgacgaaagattgttttcaagtgtaagccacttccgtcagccaaatgaatgtctggtcgctaatgtacagcaaatagacggtcttttgtacttgattatccaaggtatatttattgccctcatcgtcgttcccatcattttcaaggacgtcgccggccttacgccaaagagtgtgcctttcaacggtatcatctaagtaccgagcgttatctctcaacagtcctttgacaatccattttcctcaacagtccttttccccgcgcatttcaacgacacaatcccctgtctcgcattgaacgatttacaacgtacgccacttcaacaaactcaggatgtcactgagcatatcgagtttgacggatctcgaaacaatggacaattttttacacattcgctttgagtcaaaactgttcttttattttgtttttttttcctatttttctctagtttttccatctcttgatgtgcaagttgaatgttcagattgagcgtacatggattatacccctcagtatcttagatatggatgaatgactataacgacagcaagccaggacctaatgttaagtttgactttctggtgcagattcctcaaaggtagtacggtattatgcaaaatgatgcgatgcaccataagtggttcgtcgaattacatgtcacggaaagatacatctcgttgtaattctaggcgacatagatacatgataaaacgtagcaaggtcgtcgtcattgtagtcgttaaaatcgat

SEQ ID NO: 92 - skipped

SEQ ID NO: 93 - DNA, 1287 bp, Gibberella zeae
atgattcctcactacggcgagaagattcttctgtctcttcgtgaaatcattcgagaagatgaaccatactcacgagttacacttttggaatacctgaagcagcttcatcctcatgagtgggattgctttgtcaaggataccaagattctggcagatgagacctctcaattcaatggagaaaacgacaaggacgagaagaacactgccaagagtaagatcgatgatttgcctttctactgcatcggttttaagtcttctgcgcccgagtacaccctgcgcacccgtatctgggcatctcttcgtttccagactctctatcgtactatctctggcttcatgaactacagccgtgccatcaagcttctgtaccgcgttgaaaaccccgaggttgtccaaatgtttggtggtaatactgataagcttgagcgagagcttgagcgtatggcccgtcgtaaattcaagattgtggtttccatgcagagattctccaagttcaagaaggaagagatggaaaacgccgaattcttgcttcgcgcttatcccgacctacagattgcttatcttgacgaagagcccccagttgcggagggcgaagaacctcgtctgtactccgttctcatcgatggtcactctgaggtcatggagaacggcatgcgacgtcccaagttccgtgttcagctctctggtaaccccattctcggtgacggcaagtctgacaaccagaaccactctatcatcttctaccgtggtgaatacattcagctcatcgatgccaaccaagacaactatctagaggagtgtctcaagatccgaagtgtcctcgctgagttcgaggagatgaagaccgacaatgtctccccttatacccctggtgtcaagaacaatgtctcctcgcctgtcgctattctgggtgcccgtgagtacattttctccgagaacattggtattctaggtgatattgctgctggaaaggaacagacattcggtacactattcgctcgaactatggcacagattggtggcaagcttcattatggtcatcccgatttcctcaacggtatctttatgacgactcgaggtggtgtttcaaaggctcagaagggtcttcacttgaacgaagatatttacgctggtatgaccgctctcctccgtggaggacgtatcaagcaatgtgaatacttccaatgtggaaagggtcgtgatttgggtttcggctccgttctcaactttacaaccaagattggtactggtatgggtgaacaatttctgtctcgcgaatgttcatga

SEQ ID NO: 94 - DNA, 7326 bp, Haematonectria haematococca
ctacagtgggtgatgcccgctaagctttacggcaagcccgctgaaactcaacgacgacacctcggttatcgtcctcgaattgctcaatttaacctgattctgagtcttgaccggagttaatttgagcatgccttcttctgatatttcacccgatgatttaacaagaacatgatagctttaaccaatacaattctctgaattcgctgcgataactcatgtcccaaccctgcgcaagtcctcagtactacggcccctaacaccacttatccccggaaggcagtcgctctatccgtatcctgcacaggtcaatctcctgcgccccctgttccttgcgcacacgcccccacatcgtcacgccccgaaactcgccctggataacccggcgccgagacaagcagcgtttccctccctccccgtgcttgctcaaaggtcaaaccaccaaaccaaaaaccaccctcgctcaacttcccctttgctgttcttgcatttagcatcgccgacactctttttacggcttcatcagctctttttttcctagtctcgccgtttagcgacgacgccccccccttctccctcgaatcggtgcttcacgctcgctctacagctgcgacgtgatcggtccaacccccttcgattcgagacactacataccatcgcttggcactgcctgccaccaccactgcccgttcggcctttgacaacatctctgcatccaacgtcttgctgtgccggccacgctcgttgcttcctcatccgatctggtttcttagttacctcgctcgttatccccatgtgtacctcgaggtgagttttgcgtcgtcgattgtgcttgcggttgcaccttgtgcctgcgtctcccctacatcatccgccctcatgagcctccggttgcctctggctcttggttccctctgcctctttcgcgcatgacttgcacctcaatttatcgacaatgctaacgtgctcttttcgcgacctgcagataaaataattgaatcaacatgtcgggatacccaggcggtggtcaccatgaccagtatgatgatggctacggccgtcagcctcaacagggagggaatcagcaaggcggaaacactgactcctactaccaagacgatcagtattatgaccagggttacgacaaccacggtcgcaatgagggctactatgatgaatcgtaagcctgccgccgtgtcgaattgagtttgtaattcttgctaacggttctgcagtggctactacaacgccgatcccaacaacccttaccaccaagacgggggctactacgatggccaggaccagtaccaggacgactactatggcaatggccaaggccaaggtcagggccagggcggatactacgaccaggactacgaccggggctacaacggccagggtggccgccatggctctgaggaggattccgagacctttagtgactttaccatgagatccgacatggcccgcgctgctgagatggattactatggtcgaggcgatgagaattacaacggttacggcgacggccaacgtggctaccgacctccttcgtcgcaagtctcctatggtggaaaccgctcttccggtgcttctacccccaactatggaatggattacggaaatgtccttcctgctggtcaacgctcccgagagccctatcccgcctggacctccgacgctcagatccccctgtccaaggaagaagtggaggacatctttctcgacttgacctccaagttcggtttccagagggacagcatgcgcaacatgtatgaccacttcatgattctgctcgactcgcgagcctcccgcatgacccccaaccaggcgcttctttcgctccacgccgattacattggtggtgacaatgccaactatcgcaagtggtactttgctgctcatctcgatcttgatgatgctgttggtttcgccaacgctaaggggctcaatctgaagcgcaagggcaagaagaagaagaaggatgccgctgccaacgaggccgagaccctgcaggacctggagggcgacgacagcctcgaggctgctgagtatcgctggaagactcgcatgaaccgcatgtctcagcacgaccgtgtccgccaaatcgccttgtacctgctgtgctggggtgaggccaaccaggtccgattcatgcctgagtgtttgtgcttcattttcaagtgcgccgacgattacctcaactcgcctgcgtgccaggctctcgttgaaccggtcgaggagttcacctatcttaacaacgttatcactcccctgtaccagtacctccgagaccagggttacgagattctcgatggtgtttacgttcgtcgcgagcgtgaccacaagaacattattggttatgatgactgcaatcagctcttctggtatcccgagggcattgaccgcctcgtcctgcaggataagagcaagctgatcgatgtgccgcccgccgagcgatacatgaaactgaaggacgttcactggaagaagtgcttcttcaagacgtacaaggagtctcgttcttggttccatttgatcgtcaacttcaaccgtatctggatcattcatttgaccatgttctggttctacacttcccacaacgccccgaccctcctcgtcaaggactacgagcagcaggtcaaccagtctccaccgacaagcaaggccttctctattgttggtttcggcggtgccattgcttctctcatccagcttatcgcgaccattgctgaatgggcctacgttcctcgacgctgggcaggcgctcagcacttgatgaagcgattcttcttcatcctcctggtcttcatcctcaacgtcgcccctggtgttctcgtctttgggttctcgagcttgctcaaggagagtatcctcaagattgttggtattgttcacttcatcatcgccatcatcacgttcatctttttctccatcatgcctctcggtggactgttcggcagctacatgagcacgaagactcgtcgctatgtagccagtcagactttcactgctagttggcctgtgttgaagggaaatgacatggccatgtcttacggactgtgggctgtcgttttcggtatcaagatgggtgtctcgtacacttatctgattctgtctttccgtgatcctgtccgatatctggccatcatgaacgtcgacagctgcctgggcgacaacctactgttgaagggtgaactttgcaagtggcatcccaccattgtcttggctctgatggctttcaccgacgtcatcttcttcttcctcgatacctatctgtggtatgtgttgctcaacacgctcatgtcggttgcccgctctttctacatcggttcttctatctggactccctggaggaacatcttctctcgcctgcccaagcgtatctactccaaggtcctcgccacaaccgacatggagatcaagtacaagcccaaggttctcatctcgcagatctggaacgctatcgtcatctccatgtaccgcgagcatctcttggccatcgaccacgtccagaagctgctttaccaccaggttccttcggagcaggagggcaagcgaactcttcgtgctcccaccttcttcgtctcgcaggaagatcactccttcaagaccgagttcttccctagctacagcgaagctgagcgccgaatctccttcttcgcccagtctctgtccacccccatgccagagcccgttccagttgacaacatgcccaccttcactgtcatgattccccactacagcgagaagattctcctgtcgctccgtgagattattcgcgaggatgagccctactctcgtgtcaccctccttgagtacctcaagcagcttcaccctcacgagtgggattgctttgtcaaggacaccaagattcttgccgacgagacctcgcagtacaacggcgacgagaacgacaagggcgagaaggacacagccaagagcaagattgacgaccttcccttttactgcattggtttcaagtcttcggctcctgagtacactctccgcacccgtatctgggcctctctccgcttccagactctgtaccgtaccatctctggtttcatgaactacagccgtgccatcaagcttctctaccgcgttgagaaccccgaggttgttcagatgttcggaggcaacacggataagcttgagcgcgagctcgagcgaatggcccgccgcaagttcaagattgtcgtctctatgcagcgatactccaagttcaagaaggaggaaatggagaacgccgaattccttctccgcgcttaccccgaccttcagattgcctacctggacgaggaggcccccaccgccgaaggcgaggagcccaagctctactccgttttggtcgatggccattctgagatcatggagaacggcatgcgtcgacccaagttccgtgttcagctctctggtaaccccattctcggtgacggaaagtccgacaaccagaaccactccatcatcttctaccgtggcgagtacatccagcttatcgacgccaaccaggacaactatcttgaggagtgtctgaagattcgcagcgttctcgccgagttcgaggagatgaagaccgacaatgtttccccctatacccctggtgtcaagaacgaagtccgatctcccgttgctatcctcggtgctcgcgagtacattttctcggagaacattggtattcttggtgacattgctgccggaaaggaacagacattcggtactctctttgctcgaaccatggctcagattggtggcaagctgcattacggacatcccgatttcctcaacggtgttttcatgacgacgcgtggtggtgtttccaaggctcagaagggtctgcatcttaacgaggatatttacgccggtatgacagccctcctccgcggaggacgtatcaagcagtgcgagtacttccagtgtggtaagggtcgtgatttgggtttcggttccgtcctcaacttcacaaccaagatcggcacgggtatgggtgaacagttcttgtctcgcgagtactattacctcggcactcagcttcctctggatcgtttcctctccttctactacgcccatcctggtttccatctgaacaatatgttcattatgttctcggttcagatgttcatgattactcttgtcaacctgggagccctccgccacgagaccattccttgcaactacaaccgagacgtgcccatcaccgaccccctcttcccaactggttgtgccaacactgatgcgctcacggactggatctaccgctgcgttgtctcgattcttttcgtcctgattctctccttcatcccgcttatcgtccaggagtgcatggaacgtggtgcttggcgcgctgctctccgtctcaccaagcagttctcgtcgctctctctcatgttcgaagttttcgtctgtcagatctacgcgaactctgtgcagcagaacgtttcgtttggtggtgcgcgatacattggtaccggtcgtggtttcgccacagctcgaattccctttggtgttctctactctcgattcgcaggccctgctatctactttggagcccgacttctaatgatgcttctctttgcgacgctcacggtttggaagggcgttctcatctacttctggctcactctgctggccctgaccatctcgcctttcctgtacaacccccatcagttcgcctggaacgatttcttcatcgactaccgagactacctccgctggctctcacgtggtaactcgcgaagccatgcctcgtcctggatctcgtactgccgactctcgcgaactcgcatcacgggttacaagcgcaagactctgggcgacccttcagccaagatgtcagctgacgtcccacgagctccgcttgctaacatcttcttcagcgagatcttttcgcctctgatgctggctgttgtgacgattcttccctatctgttcatcaacgcccagactggtgttgtggccaggatccaacccgatgatgtcaagaccaagatccagccgactgactcgctcattcgcctgctcatcatctcgttcgctcccattggtgttaacgcaggtgtccttgccgctatgttcggtatggcctgctgtatgggaccagtgcttagtatgtgctgcaagaagtttggcagtgtccttgctggtattgcgcatgccacctcagtcatcttcctcctcatctcattcctgggcatgttcgttcttgagggcttcaacttttcgcgaacgatggctggaatgatcgctgctaccgcgattcagcgattctttgtcaagcttatcgtgtctttggctctgactcgtgagttcaagtcagacacgtccaacatcgccttctggaccggaaagtggtactctatgggatggcacagcatgtctcagcctgcccgagaattcctttgcaagattaccgagttgtccatgttctcagccgactttattctcggccactggctcctcttcttcatggctcctgtcatcttgatccccaaggtcgacatgctgcactctatgatgctgttctggcttcgtcctaggtatgtttctatctcatggtttacttgtgtataaactaacaattataacagccgtcaaattcgacctcctatctactcgatgaagcagtccaagcttcgccgcagacgcgtgattcgctatgccatcctctacttcaccctgctgatcgtgttcatcgcgctcattgtcggacccgtggttgccggcaagtatataggagataccatctcgtcgtcactgggcggcctcggcttcaacctggtgcagcctacggatctcaagcacgacaacaccaacagtacgtcacagactggtactggaatggcaggctacactggagctggcaagtccaagacgactggtgcccaagcctcggtcacggccaagatcaagctgttttaaggggtggaataagggggcaacagagcccaccacacaacctttgaaaagacaagagtctatgcttttggacaaggttcacgattgcgtggctgtcagcgagttgcatgcattcatgggcgcatccaagtcttttcgtcggttctattgttgttgttgttgtttttcgaaagttaaagaaattgcaaggggttcatgttttcgttatcttccttttggtcctgcaccgcacatgatcaagtttatagacagaggatgaggagagacgacgaatcagaccaagctttcgctggctgaactgggctgagagatcttttttggagggaaggcgcattttttacctctttctaatgtgtactatgaaaggaaaaacacatggcaatttttagacgcaaatgcaaataatgttgaaca

SEQ ID NO: 95 - DNA, 5927 bp, Issatchenkia orientalis
cctctaatctccccatatccattgaaattttaaccttgattaatatactcaagtctatgttttaatttccataagaacatccagtactaacatttgcccttctctttctgtcatagatgtctagcgacgatcattatgaccctaatcggtcgcaacaaggcggtcaatacgatccagcctatcaatatgatcaacaacaatacaaccaacaatatgatccaaatgtagccgcctatggacaagaaggatacgacccaaattatcagtatcagcaacaacaaccacaacaaggtggatattatgacgagcaacaatatggaggtggtcaatattatcaaaatcaacaagggggtggttattatgatcaaccaggacaacacgatccagaatcctattccgatttctcctatggtccaggtggagttccaggtactccttatgataacggtaatggtaatggcggttatggtgcaaactatactccttctcaaatgagttatggagatccaagatctagtggcgcttcaaccccttattatggtgcaggtgcgaacggaatgtatgatcaaggcatgattgcattgccaaccgatccgtatcctgcatggacggccgacaatgaagcaccagtgacaattgaacagattgaagatattttcattgatttgactaacaagtttggtttccaaagagattctatgagaaatatgtttgactatttcatggttttattagattcaagatcttcaagaatgacaccagcacaggctttattgtctctacatgccgactatattggtggtgatgctgccaactataagaaatggtactttgcttgtcaaatggatattgacgatagggttggttttgctaatatcgatctaggtaaaatcaaaaactccaaaaagaaatcaaagaaatccatcttcaaaagaagcaaaaagaacaaggaagaacaacctgtggaaaattccgaaaatgtcttgcaagaaattgaaaatgatgattcgttacaagcagcagattatcaatggagagccagaatgaatatcttgtccccaatggaaagagtccaggatattgccttatggcttctgatttggggtgaggctaatcaagttagatttactccagaatgtctctgttttatctacaaatgtgctaaagactatcttttatcagatcaatgtcagaatagactagaaccaattccagaaggtgattatttgaatagagtcatcactccaatatatcgtttcattagagatcaagtttatgaaattgttgatggccgttttgtaaagagagaaaatgaccataataaagttgttggctatgatgatgtcaatcaattattctggtatcctcaaggtctggctagaatgcacgttggtgaaacaagattaattgatttaccccaagaagaaagatactttcaattgggtgaaatcgattggaaccaaacatttgttaaaacttataaagaaacaagatcttggttgcacgttgtcaccaatttcaatagaatctgggttgcccacatttctgtttattggatgtactgtgcttacaattccccctccttatatacacacaactatgtccaagttttgaacaatcaacctttggcttcctccagatgggcttctgctacaattggtggtgctgttgcctctggtatcaatattctggctactttgtttgaatggatgtatgttccaagatcttgggcaggtgctcaacacttgacaagaagattggttttcttgatcatcctctttgccgttaatcttgctcctgtcatctttgtctttgcctatgccggtttaacttataaatccactgctgcattggccgtttccattgtgttcttttttgttgccgttgcaactattgtttacttgactgtcatgcctttgggtggtctgttttcgtcatatatgaagggcaattcaagaagatatgttgctcagcaaacttttactgcatcgtttgctcctcttcatggcttggatagatatctatcttatctggtttgggttactgtttttgctgctaaattctccgaatcttactacttccttattttgtccattagagatccaattagagatttatccacaatgactatgagatgtcatggtgaaaaatggtggggtaacaaactttgtaaacaacaggcaagaatcacgcttggtttgatgtatgcaactgatctgattttgttctttttggatacttatatgtggtacattattgtcaacactatcttctccgtgggtagatccttctacttgggtatttccatcttaactccatggagaaatatcttttctagattaccaaagagaatctattctaaagttttggctacaactgatatggaaattaaatataaaccaaaggttttaatttcccaagtttggaacgccattgtgatctcaatgtatagagaacatttgttggcaattgatcatgttcaaaaattgttgtaccatcaagttccatccgatgttgaaggtaagaggactttgagggccccaaccttctttgtctcacaagatgataacaattttactactgagtttttccctaaagattctgaagctgaaagaagaatctccttctttgcccaatcattggcaaccccaattccagaacctttacctgtcgataatatgccaactttcaccgttttcacacctcattattccgaaaagatcttgttatccttgaaggaaattattagagaagatgaccaattctctagagttactttattggaatacttgaaacaattacatcctgttgaatgggattgttttgttaaagataccaagatcttggctgaagaaactgttgcgtttgaagatgaaaaagaggatgatgtcaaacaagaaattgacgatttgccattctactgtattggtttcaagtctgctgcacctgaatacaccttaagaacaagaatctgggcttcgctaagatctcaaactttgtatagaactgtttctggatttatgaactatgcaagagctatcaagttattgtatagagtcgaaaatccagaaattgtgcaaatgtttggcggtaatgccgaaggtctagaaagagaactagagagaatggcaagaagaaagttcaaatttgttgttgctatgcaaagattggccaagttcaagaaggaagaattagaaaatgccgaattcttactaagagcttacccggatttacaaatttcttatcttgatgaggaacctcctttagaagaaggtggtgaaccaagaatctattctgctctgattgacggtcactgtgaaatcatgtcaaatgagagaagaagacctaagtttagagttcaaatttctggtaatccaattttaggtgatggtaagtctgataaccaaaaccactctattattttcaccagaggtgaatacctacaattgattgatgctaatcaagataactatcttgaggaatgtttgaagattagatctgttcttgctgaatttgaagaattaaatgtcgaacatgtcaacccttatgcacctactctgtccaaagaacctgttaaagtcactcacccagttgccattgttggtgcaagagaatatattttctctgaaaatgcgggtgttcttggtgatattgcagcaggtaaggaacaaactttcggtacattgtttgctagaactttagcgcaaattggtggtaaattgcattatggtcaccctgatttccttaactctatatatatgttaaccagaggtggtgtctccaaagcacagaaaggtttacatttgaatgaagatatttacgctggtatgactgcaatgttgagaggtggtagaatcaagcattgtgaatattatcaatgtggtaagggtagagatttgggttttggttccattttgaatttcactaccaagattggtgccggtatgggagaacaaatgttatctagagaatattactacttaggtacgcaattaccattggacagatttttctctttttactatgcccacttaggtttccacattaataacctgtttatttctacatctttgcagatgtttatgttaactttggtcaatatcaactcattagcccatgaatccattgtctgtatctacgataagaataagccaattactgatgtcttatatccactaggttgttacaatttagctccagcaattgattggattagacgttatacattatccattttcattgtcttctttatctcgtttgttcctttggttgttcaagaattaattgaaaggggtatttggaaaatgtgttacagatttattagacatattagttctctatctccattgtttgaagtctttgttgcacaagtctattctactgctttgattaatgatgtttccattggtggtgcgagatatatcgctactggtagaggttttgcaacttccagaattccattctctgttttgtattccagatttgcagaaggtactatttatgttggtgcaagatgttctattattttactattcggtactattgcacattggcaaccagcattattatggttctggaccatcattgttgcattgatgttctcgccatttgttttcaaccctcatcaatttgctcgtgaagattacttcattgattacagagattacatcagatggttatctagaggtaatactaagtggcacagaaactcatggattggttatgttagattagccagatctagagttactggtttcaagagaaagacaattggtgatgaatctgaaaaggctgctggtgatgcaccaagagcccacagaactaccgtcttaatgtccgacactattccatgtgctatttactgtgcaggtttatttgttggatatactttcatcaatgcccaaaccggtgttcgtgatgcaaagatggtcaatgcgactttgagattgattatttgcgccttaggtccaattgtcattaactgtggtgtcttatttgttaccttgggtatgtcgtgctgttccggtccattatttggtatgtgttgtaagaaaacaggtgctgttatggcaggtattgcgcatggtgttgccgtcatcgttcacattgtgttctacattgttatgtgggttatggaaggtttccattttgcgagaatgttgcttggtttaattaccatgatttacatccaaagattgattttcaaatgtattaccctgtttgttttgactagagagttcaagaacgatcactccaatgttgcgttctggacaggtaaatggtatggttctggtttaggtcttgcggcttggtcccaaccatcaagagaattttgcgcaaagattattgaattatcacattttgcgggtgattttgttttaggtcatgttctattgttttgccaattacctcttgttttaattccaaccattgacaggtggcattctatgatgttattttggttgaagccaaacagacaaatcagacctccaatttattctctgaaacaagctaggttgagaaagagaatgatcaagaagtattccgtcttatactatactgttttagtcatttttgttgccttgattgctgcacctgctgttgtcggtggtttgaagaatgtcaatgtcacaccaactgatttgcctgagttcgccgacggtttattccaacctagacatcaaaataacaatgatacaggttttggttctggttcataccacccacactggactactaccacttcattggttactttctctactaagaaataattctattagagtgtactcagcagtcaaattggagaggtcaatttgtatttattatatcggctactactgtattatccaggctgttttttcttttaccctatcggataatgcagttgtacatttttttcttatttcctccctcattacaccctt

SEQ ID NO: 96 - DNA, 5637 bp, Kluyveromyces lactis
atgtcttacaacgatccgtaccaggatcaaggtggtcatatcccaagggatgagtacgaccaacaacagtacgatgaatatggtcaaccaatctatgcgcaagatcaatattacgcgcaagacccgggctactacgatcaatctgctgaatattaccaacagccaggtcaaccgggccaaccgggccaaggctactatgatcagcctcgtggtgctggccaggatcctgaaaatttctctgatttcagttacgctcctccaggtaccccaggtggctacgatagttacggaggcgcttccgggaacggatacggtcaatatgctccttctcaaatgagttatggtgatccaagatcatctggtgcttcgacaccaatttatggtggtgaaggtttcgatccttcagcagttgccatggctttaccaactgaaccatatccagcatggaccgctgacactcagactccagtgaccgcaagcgaaattgaagatgttttcatcgatttgactaataaatttgggttccaaagagattccatgagaaacatgttcgatcatttcatgactctattggattctagagcttcaagaatgtctcctcaacaagcattgttatctttacatgctgattatatcggaagtgatagtgccaattataagaaatggtacttcgctgcacaactagatatggatgatgaaattggtttcagaaatatgagtcttggtaaaatgtctagaaaggcaagaaaggcaagaaagaagaataagaaggccatggaagaagctaacagctcggaaaatccagagagtgctttgaaccaattggaaggtgataactctttggaagctgcagatttcagatggaaggctaagatgaacaaactttcaccagtggaaagagttcgtcaaatcgctttgtatttgttactatggggtgaagccaatcaagtcagatttacctcagaatgtttatgtttcatctacaagtgtgcttctgattatttagattctcctctttgtcagaaccgttcagatcctattccagaaggtgatttcttgaacagagttatcactccaatttatagatttattagatctcaagtctatgaagtggtggatggtcgttacgtgaaacgtgaaaaggatcataacaaggttattggttacgatgatgtaaatcagttgttttggtaccctgaaggtatagccaaagtaatcttggaagatggcactcgtttgatcgatttgcccgctgaggaacgttatttgagattaggtgacgttatttgggatgacgttttctttaagacttataaagaaacacgttcttggttccatttggtcaccaatttcaaccgtatctgggtcgttcacgcctctatctactggatgtacaccgcttacaatgccccaactctttacactcataactaccaacaactattaaacaacaaacctttggctgcttacagatgggcctctagtgcgttggctggttctttggcaactattattcaaattgtggcaactatctcggaatggttctttgtcccaagaaattgggctggtgctcaacatttgtctcgtcgtttctggttcttggttggtatcctcggtgttaacttgggtccaatcatctttgtcttcgcctatgatcctttgaccgtttactccaaggccgctttagtagtctctgcagttatgttctttgtcgctttgattaccatcattttcttctccattatgccattaggtggattattcacatcgtacatgaaaaaatctactagaaaatatgttgcatctcaaacttttacagcttctttctaccaattgaagggtcttgatatgtggatgtcttatttattatgggttaccgtttttgcagctaagttctccgaatcctatttcttcttgaccctttccttaagagatccaatcagaattttatctaccactgtgatgagatgtactggtgattatggttataaagatcaactttgtcgtcaacaaccaaagatcgtcttaggtttgatgatcgctactgatttgatccttttcttcttggatacttatatgtggtacattatttgtaacactgttttctctgttggtagatctttctacttgggtatctctatcttaacaccatggagaaacatcttcaccaggttaccaaagagaatttactcaaagatcttggctactactgatatggaaattaaatataaaccaaaagttttaatctctcaagtttggaatgccattgtcatttccatgtacagagaacatttgttggccattgaccacgttcaaaagttgttataccatcaagttccatctgagattgagggcaagagaactctaagagctccaacctttttcgtgtctcaagatgataacaatttcgagactgaattcttcccaagaaactccgaagctgaacgtcgtatctctttctttgctcaatctttggctactccaatcccagaaccattaccagttgataacatgccaactttcaccgttttgacacctcattactccgaaagaatcttgctatctttaagagaaattattcgtgaagatgatcaattctcaagagtcactttgttggaatatttgaagcaattgcatcctgtcgaatgggattgtttcgtcaaggatacaaagatcttggctgaagaaactgctgcatttgaaggaaacgaggaggattctgaaaaggaaggtggtatgaagtcacaaatcgatgatttaccattctactgtatcggtttcaagtctgctgcaccagagtacactttacgtacccgtatttgggcctcattgagatcccaaactttgtaccgtactgtttctggtttcatgaattatgcaagagccattaaattgttgtaccgtgttgaaaaccctgaaattgttcaaatgttcggtggtgatactgaaggtttggaaagagagttggaaagaatggcgagaagaaagttcaagttcttggtctctatgcaaagattggctaagtttaaacctcatgagctagaaaatgccgaattcttgttaagagcttaccctgacttacagatcgcttatttggatgaagaacctccattgaacgaaggtgaagaaccaaggatttactccgctttgattgatggttattgtgaaattatggaaaatggtcgtagacgtcctaagtttagagttcaattatctggtaacccaatcttgggtgatggtaaatccgataatcaaaaccatgctttgattttctacagaggtgaatacattcaattgattgatgctaaccaagataactatttggaagaatgtttgaagattagatctgtcttggcagaattcgaagaattgaacgttgaacaggtcaacccatactctccaggtttgaaatacgaagatcaaggtaacaaccatccagttgctattgttggtgctcgtgaatatattttctctgaaaactctggtgtcttaggtgatgttgcagctggtaaggaacaaactttcggtaccttatttgctcgtaccttggctcaaattggtggtaaattgcattatggacatccagatttcgtcaatgctacttatatgacaaccagaggtggtgtctccaaggctcaaaagggtttacatttgaacgaagatatttatgccggtatgactgctatgcttcgtggtggtcgtatcaagcactgtgaatattatcaatgtggtaagggtagagatttaggttttggtaccattttaaatttcacaactaagattggtgctggtatgggtgagcaaatgttatctcgtgagtactactacttgggtactcaattgcctttcgatcgtttcttgtctttctactacgcgcatcctggtttccatttgaataacttgtttattcaattgtctttgcaattatttatgttaactcttgttaacatgaattctatggctaatcaatccatcatgtgttcctataacaaatacaagcctatcaccgatgttctatatccaattggttgttacaactttgaacctgttattgattgggtcagacgttatacattatccatctttattgtgtttttcatcgcattcattccaattgttgttcaagaattgattgagcgtggtatctggaaagctgttcaaagattcttgcgccacttactatctctgtctccaatgtttgaagtctttgccggtcaaatctattctgcatctttattgagtgatttgacagttggtggtgctcgttatatctctactggtcgtggtttcgctacttctcgtattccattctccattctatattctagatttgctggttcagctatttacatgggttcaagatctatgttaatgttgttattctctacaattgcctactggcaagctgctttactatggttctgggcctcattatcggctttgatgttctctccattcatcttcaatccacatcaattttcatggcaagatttcttcttggattacagagatttcatcagatggttgtctagaggtaacaataaatatcacaagaattcttggattggttacgttagaatgtcaagatctcgtgtcaccggtttcaaacgtaagctggtcggtgatgaatccgaaagagccgctggtgatgctccaagagctcatagatctaacttaatcttcgccgaattaatcccatgtatcatctacgccgctggttgtttcactgcattcactttcattaatgctcaaactggtgttaaggatgtcagtgttgtgaactcttggttgcgtattgtcatctgtactttgggtccaattgtcgtcaacatgggtgtacttggtgtatgtttaggtctatcttgttgttcaggtccgttattgggtatgtgttgtaagaagactggttccgttatggccggtattgctcatggtgttgcagttattgttcacattgtcttcttcatcattatgtgggttcttgaagctttcaatttcactaagatgttgatcggtttgatcacttgtattcaatgtcaaagattagtcttcaagtgtatgaccttgttcatgttaactcgtgaattcaagaatgatcatgcaaacactgcattctggactggtaaatggtatggtactggtttgggttacatggcctggactcaaccatcaagagaattcgttgctaaagttgtggaactctcagaattcgctgctgatttcattttgggtcacatcttgctattctgtcaattgccaatcttatgtattccaatggctgataaattccattctatcatgttgttctggttaaagccttctcgtcaaattcgtccaccaatctattctttgaagcaaacacgtctacgtaaacgtatggtcaaaaaatactgttcgttgtacttcctggttttggcaatattcgctgcttgtatcattggtccagctgtcgctgcttcaaaggtggatactgcggatcttggttctaaggtggacagtgccggtagtgatattttcgctggtttgattcaaccaagaagacaacaaaacaacgatactggtttcaatttgtccacttattctggacattacttcaccaaagccccatctttgactacctggtccaccaaggcctga

SEQ ID NO: 97 - DNA, 5343 bp, Laccaria bicolo
atgcctgcccgcccagggccctccagccaggaaggctacccttcgtcgcccccgtcagccgacacccactccaacgaccccttcaaccagggaaggcgctactacgacaacgagtccgaccatgtagagttcggtcgtcgcgagtatagggagacgtacgcctcagacagcagcaatcctgcaatcaatgattacgacaacaacggcaactatgactatcccatgcaagataccgactctgatcctgacgtctatgcacggccagcaccgtcatccgaatcgctaggccctccaggagtccgtagtgtctatcccgaatcagccacgccgacctatatggaatacgcaggcccggccggcgctcgagaagcataccctgcgtggagctcagatcgtcaaatccctctttcaaaagaagaaatcgaggacatttttcttgacctcacgcaaaaatttgggtttcagcgagattccatgcgaaatatgttcgatttcctaatgcagctactcgacagcagggcatctcggatgtcgcctaatcaagcactactgacgctccatgccgattacattggcggtcaccacgccaattatcgcaagtggtattttgccgctcagctcgatcttgacgacgccatcggccaaacgcagaatccgggcttaaaccggctcaagtcaaaacgtggtgccaagcgtccaccccacgaaaagtcactagcaactgcccttgaacgatggcggcaagctatgaacaacatgagccaatacgatcgccttcgccaaattgctctctatcttttgtgctggggggaggctgcacaagtacggttcgtgcccgagtgcctttgtttcatcttcaaatgtgcggatgactactatcggtctcccgagtgccaaaatcgtgtcgagcctgttcccgagggtctttatctcagggcggttacaaaaccactctatcgtttcattcgtgatcaaggctacgaggtcgtcgatgggaagtttgtgagaagggagagggatcatgagaacatcattggctacgatgatgttaatcagctgttttggtatccggagggtattgcgaggattgtgttgaacgacaagacgcgccttgttgatcttccaccggcacaacgcttcatgaagttcgatcgcattgattggaataaagccttcttcaagacctattacgaaaagcgcactttcggtcatctcctggtcaacttcaatcgcatctgggtcatccatattgccatgtactacttctacactgccttcaactcacccaccatctacgccgttgatgggcactcgtcaccggccatgacatggagcgctactgccctgggtggtgctgttgcaactctgattatgattctcgccacactctttgaattttcgtacatccccacgacttggaacaacacctcacatctcacccgacgccttgttttcttgctgatcactcttggtcttacctgtggcccaacgttctacattgccattgtggaacataatggcacaggtggttcgctttccctcatcttgggcatcgttcaatttttcatttctgtcgtcgcaactgtcctcttcgccgtcatgccatcaggtcgcatgtttggtgaccgggtggcaggtaaatcacgaaagtacctcgccagtcagaccttcactgcaagctaccctgcacttgagaagaaaaatcgcattggctccatcgtcctatggattctcgtctttggatgcaagttcacagagtcttacttctaccttaccctatcattcagtgaccctatccgtgttatggtcgggatgaagattcaaggatgtcaggacagattctttggaaacgccctctgcaccaaccaagctgccttcacgctgacgataatgtatatcatggatttggttctcttcttcctagataccttcctttggtacatcatctggaatacggttttcagtatcgcccgttctttcacgttgggtctatccatttggaccccatggagggacatatacacccggttacccaaaaggatctatgcaaaattgctggccacaggcgacatggaggtgaagtacaagccgaaggtcctcgtctcgcaaatttggaacgctatcatcatctccatgtaccgtgagcatctcctgtccatcgaccacgtccagaaattgctctaccatcaagttgatactggtgccggtggtcgacgaagtcttcgtgcccctccgttcttcatctcgcagggtgagaagggcttcaaaggggagtttttcccgccgggcagtgaggctgagcgtcggatttcgttctttgctcaatccttgacaacatccatcccggaaccccttcctatcgatgccatgcccactttcaccgtcttgacaccccattacagtgagaagacccttctctcacttcgtgaaatcattcgtgaagaagatcagaatacccgtgttactctgttggaatacctaaagcagcttcatccggttgaatgggagaatttcgtcaaggataccatgattcttgctgaggagtccgccatgttcaacggcgttaacccattcgcaaacgatgagaagggccaatcaaaagcaaacgatcttcctttctatttcatcggcttcaaaagcgctgcccccgaatttacccttcgtactcgtatctgggcttcccttcgtgcccagacactttatcgcaccgtctccggtatgatgaactactccaaggctatcaagctgctgtaccgtgtcgagaatccagaggtggtccagttgttcggaggcaacaccgacaagcttgaacgggaactggagcgcatggccaggagaaaattcaagtttgtggtctcaatgcaacggtactcgaaattcaacaaggaggagcacgagaatgccgagttcttattgcgagcataccccgacctacagatcgctttccttgaggaagagcctccccgcaaggagggtggcgaccccaggatcttttcgtcgctcattgacggtcacagcgagtctatccccgagactggtcgtcgcagacccaagttccgcatcgagctccctggtaatcccattctcggagatggaaagtcggacaatcagaatcatgccatcatcttctaccgcggggaataccttcagcttatcgacgctaatcaggacaactacctcgaagagtgtctcaagattaggaacgtgttgtccgagttcgaggagtatgccgtctcgagccagagcccgtacgctcagtgggaccacaaggatttcaaaaagccacctgttgccatcgttggtgcccgcgagtacatcttctctgagaatattggtatccttggtgatttagctgctggaaaagaacaaacattcggaaccctcgcagctcgatcgatggcgtggattggaggaaagcttcattacggacatccagattttctcaatgctttatatatgactacccgtggcggcgtgtcgaaggcgcagaagggattgcacttgaatgaggatatcttcgctggtatgaacgcctttggtcgtggaggtcgcatcaagcacacagagtattatcagtgcggcaagggccgtgatctcgggttcggaaccattctcaacttccaaacgaagattggtacaggtatgggtgaacaaatgctcagccgagaatattactaccttggaacacaacttcccatcgaccggttcctcaccttttattacggacatccgggtttccagatcaacaatatgctggtcatcttatcagttcagatattcgtggtgaccatggtgttcctggggactttgaactcgcggctccagatttgcaagtatacctcgtcaggtcaattcattggtggtcaagctggatgctacaatctagttcctgtctttgagtggatcagacgttgcatcatcagcattttcttggtattcatgatctctttcttgccattgttccttcaagaactcgttgagcgtggaacctggaaagccatcttccgcctcgcgaagcaattcggctcattatcccccgtcttcgaggtcttcgctacgcagatctatacccactctattcttagcaatttgaccttcggtggtgctagatatatcgcaaccggtcgtggtttcgcaaccaccaggattcacttcagcacgctcttttcgcgcttcgctgggcccagcatctatctggggatgaggacactgatcatgcttctttatgtgaccttgtcgctttggactccctacctcatttatttctggatatccatcctctcgttgtgtattgctccgttcgtgttcaatccgcatcaatttgtgttctccgatttcatcattgattatcgggaattcttgagatggatgtcccgaggtaattcgcggtcacacaacaactcgtggattggttactgccgcctgtctcgcactatgatcactggttacaaaaagaagaaactcggtcatccttcagagaaactctctggagatgttccacgagcgggatggcgggcagtcatcttctccgaggtcatcttccctatcataatggccgttctcttcgtcgtagcctatatgttcgtcaaggcattccccgatgcagatgggaggtatcccccaagtcctctgatccgtattgctgtcatttcactcggtcccattgtgtggaatgcagccatacttctcaccctcttcctgatctctctgttcctcggtcctatgctcgaccctgtgttccccatcttcggctctgttatggcattcattgctcacgcctttggagtggtgggaatgattggtttcttcgagttcttgtggttccttgaggcgtgggatgcgtctcacgctgtcttgggtctaatagccgtcattgcaattcagcgtgctattcataagatcctcatcgccgtcttcctttcacgtgagttcaagcacgacgaaactaaccgagcatggtggaccggacgctggtatggtcgtgggcttggtgcacatgtaatgtctcaaccggcgcgagagttcattgtcaagatcatcgagctgtcgttatggagctctgatctacttcttgggcacatgctgctgttcatgctgaccccgcccatcctgataccctactttgatcgcttccatgccatgatccttttctggcttcgtccatcgaaacaaatacgtgctccattgtactccatcaagcagaagaggcaacgccgctggattatcataaaatacggcataatctatatcgtagtcattgccctcttcgtcattctcattgctattcccgccgtattccgaactactctaaaaatcaactgcactctttgtaacaatctctaa

SEQ ID NO: 98 - DNA, 5697 bp, Lachancea thermotolerans
atgtcctacaacgatcaggctaaatactacgatcagcagggccaggcggagcagggctacgacgcccagcaaggatatgctgctgacccataccagaactacggccagcaggctcagttcgatgagtacggccagcctatctacactgaagggcagtacgaccacgaagatgccgcccactacgaccccaacgctgccgactactacgctcagcagggctacgaacccgaccaagccgactacggcaacggcaacgcatactacgagcagccacgtggcatgggccaagaccccgagaacttctcggacttcagctacggtcctccagggaccccaggctacgacggctacggcaacgctaatgccggccagtacacgccttcccagatgagttatggggagccccgttcttccggcgcttccactcccatctacggtggcgaaggctttgactcgtcggcgattgccatggctttgcccaacgagccataccccgcatggaccgcagacaaccagtctcctgctactattgagcagatcgaggatgtgttcattgaccttgccaacagatttggtttccagagagactctatgagaaacatgttcgatcacttcatgaccttgttggactccagagcctccagaatgtcgccacaacaagcgttgctctcgttgcacgctgactacattggaggcgacactgccaactacaaaaaatggtatttcgccgctcagctggatatggacgacgaggtgggtttccgtaacatgagcttaggcaagctctcaagaaaagccagaaaggccaagaagaagaacaagaaggccatgaaggaggcagacgccgaagacaccgacgccatgttgagcaagctggagggtgacaactcattagaggctgctgactttagatggaaggccaagatgaacaaattgtctcctttggaaatggttcgtcaagtcgctttgtacttgctaatttggggtgaggctaaccaagtcaggtttacttctgagtgtctgtgtttcatttacaagtgtgcttctgattatctggactctccgctgtgccagcagcgcactgagcctattcctgaaggcgactacctaaacagagtgatcactccattatatcttttcttgagatctcaagtgtatgaggtcgtggacggccgcttcatgaagcgtgaaagagatcacaataaggttatcggttacgatgatgtaaaccagttgttttggtacccagagggtattgctaaaattgtcttcgaggacggatcaaggctaattgacctgcctgcagaggaacgctatctcaggttaggagaggtgtcttggaatgatgtctttttcaaaacatataaggagattcgttcatggttccacttggttaccaacttcaaccgtatctgggttattcacgggtgcgtctactggatgtacatggcatatgtctcgcccacgatatacactaagaactaccagcagcttgttgacaacaagccgactcctgcttatagatgggccactgcggctttgggtggtaccctagcgtgtgttattcagattgttgctacgattgctgagtggttttttgttccaagaaattgggctggtgctcaacatttatctcgtcgttttatgtttttggtcttacttctggcgatcaacttagctcctgtcattttcgtgttcgcgtacaccggaagagacatttactcgaaagctgccaatgctgtggctggtgtcatgttctttttctccctgggaacggttgttttctttgccgtaatgcctttaggtgggctgtttacgtcttacatgaagaagtccactagaaaatacgtggcttcgcagaccttcacagcatcttttgctcctctcaagggtattgacatgtggatgtcttacttactttggtttaccgtttttgctgcgaagtactccgagtcttacttctttttgatcaagtcgcttattgaccctgtcaggattttgacaaccactactatgagatgcactggtgatttctggtttaaaaacaagttgtgcatgcaccaaccaaaaattgtgctgggcttgatgatcgcaacagatttcattttgtttttcctagatacattcatgtggtacgttatttgcaacatgatctactctgtcgggagatcattttacctcggtatatctatcctgactccttggagaaacattttcacgagactgcctaagagaatctactccaagattttggctaccaccgacatggagattaaatacaagccaaaggttttgatttctcaggtttggaatgctattgttatatcaatgtacagagagcacttgctagccatagaccacgttcagaagctattgtaccaccaagtgccttccgaaattgagggcaagagaactttgcgtgctccaactttcttcgtctctcaggatgataacaattttgaaacggagtttttccccagggattctgaagctgaacgtcgtatttccttttttgcacaatcgcttgccacgcctattccagagcctttgcctgttgacaacatgccaactttcactgttttgacccctcattactctgaaagagttcttttgtctttgagagagattatccgtgaggacgatcaattctcaagagttactctcttggaatatctgaaacaattgcatcctgtcgaatgggactgctttgtgaaggacaccaagattttgtcggaagaaacggctgcttatgaaggcgctgaagaagactctgaaaaggaaggtggcttgaaatcccaaattgacgatctaccattttactgcatcgggtttaagtctgccgctccagaatacactctccgtacaagaatttgggcctctttgagatcccagacactataccgtaccgtttctggtttcatgaattatgccagagcaatcaagcttctatatcgtgttgaaaacccagaaattgtccagatgtttggtggcaatgctgagggcttggagagggagctggagaagatggccagaagaaaattcaagtttttggtttccatgcagagacttgccaagttcaaggctcatgaactggaaaacgccgaatttttgttgagagcttatccagatcttcagattgcttacttggatgaagagcccccattgaatgaaggtgaggaaccaagaatcttttccgcacttattgacggccactgtgaactactgccaaacggccgcagacgccctaagttcagagttcaactttctggtaaccctatccttggtgatggtaaatctgacaaccaaaatcatgccatgatcttttacagaggtgaatacttgcaacttatcgatgccaaccaagacaactacttggaagagtgtctgaagatcagatccgttttggctgagtttgaagaattgaatgtcgagcaaatcaatccatatgctccaggactgaaatacgaagaacaaacgaccaaccaccctgttgctatcgtaggcgcaagggagtatatcttctcagagaactctggtgtattgggtgacgttgctgccggtaaggagcagacattcggtactttgtttgcacgtaccttggcacagattggtggtaagttgcattatggtcatcctgatttcatcaatgccacttacatgacgacaagaggtggtgtttctaaggcccaaaagggtctgcatttgaacgaagatatttacgctggtatgaatgctgttttgcgtggtggtcgtatcaagcactgtgaatattatcaatgtggtaagggtagagatcttggttttggtacaattctgaatttcacaacaaaaattggtgctggtatgggtgagcagatgttatctcgtgaatattattatttgagtactcaactccctctcgaccgtttcttgtccttctactacgcgcaccctggtttccacttgaataacttgttcattcagctgtccgtgcaactatttatgctgacgttgatgaacttgaatgctttggcacacgagtccattatgtgcatctacaacagaaacaagcctattactgacgtgttgtacccacttggatgttacaacttttcacctgttgtcgactgggtaagacgttacacgctctccatcttcattgtttttttcatctcttttattcctattgtggttcaagagctgatcgaaagaggaatttggaaggccactcaaagatttttcagacatataatctcgttatctccaatgttcgaagtgtttgccggtcaaatttactcgtcttcgcttttgagtgatttaacagttggtggcgcccgctatatctctacaggacgtggttttgcgacttcccgtattccattttctattctttactcgagatttgcgggctctgctatttacatgggcgctagatgtatgttgatgctattgatgggttctgtggctcattggcaggcacccttgctctggttctgggcgtctttgaccgcgttgatgttctcacctttcatcttcaaccctcatcagttttcttggcaagactttttcttggactaccgtgatttcatcagatggctgtcgagaggtaacaacaaataccataggaactcgtggattggctatgtcagaatgtcaaggtctagagtgaccggttttaagcgcaagttggtcggcgacgagtctgagaaaggtgcaggcgacgctgccaaggcccacaagagtaacatgattctcgctgacattattccatgtgctatttacgctgctggttgtttcgttgcctttacatttatcaatgctcaaactggtgtgaaggatgcagacttagtgaattcgacgttgcgtatcattatctgcactcttgctccaattgccgtcgacatgggtgttctgtttttctgtgttggaatgtcgtgctgctccggtcccttgttcggcatgtgttgcaagcgaactggttctgttatggccggaattgcgcatacagttgctgttgtcgtccacgtcgtgttttttattatcatgtggttgctcgaaagttttaactttgcaagaacacttgcaggtgtagcaacttgcttgtactgccagagattaatatttaaggtcatgactgtattcatgttgacacgtgagttcaagaacgaccatgcaaacactgctttctggactggtaaatggtacggcggtggcctgggttacatggcatggacacaacctacaagagagtttgttgctaaagtcgttgagctctctcatttcgcgggtgactttgtcttgggacatttcattttgttttgccaactgccagttctgtgtattccaatgattgacaagttccactccattatgcttttctggttgaagccatcgcgtcaaatccgtcctcctatctactcgctgaaacaaacgcgcttgaggaagcggatggttagaaagtactgtgctttgtacttcattgtcttggctgccgccgttgcctgcattattggtccagctgtggcgtctggccaaacgaaacgcacaccctttgcggaccaaactgagaagattgacccagttaacatgaagtggttggttaacatcgttcaaccaagacaccaagacaataatgacactggtactagcttggaaggtgtgagtggtcattattatagtcacactccttcaatgcactctttctctaccaagaaatag

SEQ ID NO: 99 - DNA, 5808 bp, Lodderomyces elongisporus
atgtcgtataacgataataaccacaacaataacaacggaaacaacaactactacgaccctaaccaacaggttggtggtggtagtagtggtagtgatgttaatggtgtttcggcaaacgatggctactatcaacagcaggttgatgatggcactgccaacatgtaccaacaagcaccaccacaacaacaagattactatgacccaaacgctcaatatggccaggatccaaacatgccatatggccaagatccaaacatgcaataccatcaacaaccttatgacatggatgggtaccaggatccaaaccaatatggtgggcaaccaatgaatgctcaaggttacaatgctgacccagaagcattctctgactttagttacggtggtggtcaaaccccaggtactccaggctatgatcaatacggaactcaatacacaccatcccaaatgagctacggtggagatccaaggtcttctggtgcatcaactccaatctatggaggccaaggccaaggttacgacccttcacaattccacatgtcctccaacttgccatatccagcatggtcagcagatcctcaagccccaatcaagattgagcacattgaggatatctttatagacttgaccaacaagtttggtttccaaagagattccatgagaaacatgtttgattatttcatgacattgttggactcgagatcatctcgtatgtcccctgcacaagccttgttgagtttacacgctgattacattggtggtgacaatgccaactatagaaaatggtttttttcatcacaacaggatttggacgactctttgggattcgccaatatgacattgggtaaaattggtagaaaagcaagaaaagcctctaaaaaatccaaaaaggcgagacaagctgccgaggaacatggtcaggatgtcgatgctttggctaatgaattggagggcgattactcattggaagcagccgagattaggtggaaagccaagatgaacaccttgactcccgaggaaagagtgcgtgatattgctctttacttgcttttgtggggtgaagccaaccaagtgcgttttacaccggaatgtttgtgttatatctacaaagttgcatatgattacttggaatcgccaatgtgccaacaaagacaagaacctgtccctgaaggtgactacttgaaccgtgttattacacctttgtataggttccttagatctcaagtttacgagatttacgaaggtagatttgttaaacgtgaaaaggatcacaataaggttattggatatgatgatgtcaatcaattgttttggtatcccgaaggtatttctagaatcatgtttagtgatggaaccagattggttgatattccaaaggaagagcgttatttgagattgggtgaagttgaatggagcaatgtatttttcaaaacttataaagaaattagaacatggttgcactttatcaccaactttaacagaatctggattatccatttcaccgtttactggatgtatactgcatacaactcgccaacattgtacactaaacattatgttcaaactatcaacaaccaaccacttgcttcatctagatgggcttcgtgtgccattggtggtgtccttgcctcatttattcaaatcttggctacaatttttgaatggatgtttgttcctagagaatgggctggtgctcaacacttgacgcgtcgtttaatgtttttgattggtatctttgtgatcaacttggtaccagtggtttacacattccaagtcgctggtttgacattatactcaaagtctgcacttgctttatcgattgttggtttctttattgccgttgccacattggttttctttgcaattatgccattgggtggattattcacatcctacatgaacaagagatccagaagatatatttcttcgcaaacatttactgccaactttattaaattgagaggattggacatgtggatgtcttacttgttgtggtttttggttttccttgccaagatggttgaatcttatttctttttgaccttgtctttaagagacccaatcagaaacttgtcaacaatgcaaatgagatgtattggtgaagtttggtacggagtccgtgtctgtagacaccaagccaagattgtgttgggattgatgtatcttgttgatttgcttttgttctttttggatacttatatgtggtacattatctgtaactgtatcttttccattggacgttcattctatttgggtatttccatcttgactccctggagaaatatctttactagattaccaaagagaatttactcaaagatcttggccactactgaaatggaaatcaagtacaagccaaaggtgttgatttcacaaatttggaatgctattgttatctctatgtacagagaacatttgttggctattgaccacgtgcaaaaattgttgtaccaccaagttccatctgaaattgaaggaaagagaactttgagagcaccaacattctttgtttctcaagatgataataactttgaaactgagtttttcccaagaaactctgaggctgaaagaagaatttcattctttgctcaatcattggcaacccctatccccgaacctttacctgttgataatatgcctacatttaccgtgttcactccccattactctgaaaagattttattgtctttgagagaaattattagagaagatgatcaattttcaagagtcactttgttggaatacttgaaacagttgcatccagttgaatgggagtgttttgttaaggacacaaagattttggctgaggaaactgctgcttacgaaaatggtgaagactctgagaaattatccgaagatggtttgaaatccaagattgatgatttgccattctactgtattggtttcaaatcagctgctccagaatatactttgagaaccagaatctgggcctctttgagatcgcaaactttgtacagaactgtttccggttttatgaactatgctagagctattaaattgttgtacagagttgagaacccagagcttgtgcaatactttggtggagaccctgaaggcttggagttggctcttgaaaagatggctagaagaaaattcagatttttggtttctatgcaaagattgtccaaattcaaggatgacgaaatggaaaatgctgaattcttgttgcgtgcttaccctgacttgcaaattgcttacttggatgaagaacctgctttaaatgaagacgaggaaccaagagtctactctgcattgattgatggtcattgtgagatgttggagaatggtagacgtcgtcctaaatttagagtgcaattgtctggtaacccaattttgggtgatggtaaatccgataatcaaaatcatgctattatcttccacagaggtgaatacattcaattgattgatgcaaatcaagataactatttggaagaatgtttgaagattagatctgttttggctgaattcgaagaattgaatgttgagcatgtcaacccatacgctccaaacttgaagactgctgatcctgctgacaagaaagaccctgttgctattttgggtgccagagaatatatcttttccgaaaactctggtgttttgggtgatgttgcagcaggtaaagaacaaactttcggtactttgtttgctagaactttggctcaaattggtggtaaattgcattatggtcacccggatttcttgaatgctacttttatgttgactagaggaggtgtttcaaaagcacaaaaaggtttgcacttgaacgaagatatctacgcaggtatgacagccatgatgagaggtggtaagattaagcattgtgaatactaccaatgtggtaaaggtagagatatgggtttcggatccattttgaattttactaccaagattggtgctggtatgggtgagcaaatgttgtcaagagagtactactacttgtccactcaattgcccttggatcgtttcttgtctttttactatggtcacccaggtttccacattaacaatttgtttattcaattgtcattgcaagtgtttatgttggtgttggctaacttgaactcgttggctcatgaagctattatttgttcttacgataaggatattccagtcactgatgtcttgtacccatatggttgctacaatctttcaccagccgttgagtggattagacgttatacattgtctatctttattgtgtttttcatctctttcattccattggttgttcaagaattgattgaaagaggtgtttggaaagcattccagagatttgttagacatttcatttcattgtcgccaatgtttgaagtgtttgttgctcaaatctattcctcgtctgttttcaccgatttgactgttggtggtgcaagatatatctccactggtagaggttttgctacttcaagaattccattttcaatcttgtattcacgttttgctgattcctcgatctatatgggttcaagattaatgttgatcttgttgtttggtactgttgctcactggcaagcaccattgttgtggttctgggcttccttgtcgtcattgatgttctcaccattcatatttaacccacatcaatttgcttgggaagatttctttattgactatagagatttcatcagatggttatcaagaggtaacaccaaatggcacagaaactcgtggattggttacgttagactttctagatcacgtattactggtttcaagcgtaagttgactggtgatgtttccgaaaaggctgctggtgacgcatctagagctcacagatcaaacattatctttgctgacttccttcctactttgatttacactgctggtctttttgttgcttttacatttatcaatgcgcaaaccggtgttaccaaatatccatacgagattttgggttcaaccagcccacaaccagtcaattcggttttgaggcttatcatttgttcattggctcctgttgtcattgactgtggtgtcttgttcttctgtgttggtatggcatgttgtgctggaccaatgttgggcttgtgttgtaaaaagaccggtgcagtcattgcaggtattgctcatggtgttgccgttattgttcacattgtctttttcattgttatgtgggttactgaaggtttcaactttgcaagaatgttgttgggacttgccacaatgatttatgtgcaaagattattgttcaagtttttgaccttggcctttttgacgagagagttcaagaatgacaaggccaatactgcattctggactggtaaatggtacaacaccggtatgggatggatggcatttacccaaccatctcgtgagtttgttgccaagattgttgaaatgtctgagtttgctggtgatttcatgttggcccacattatcttgttctgccaattgccaattttgtttgttccattaatcgacagatggcactcaatgatgttgttttggttgaaaccatcaagattgattagaccaccaatctactccttgaagcaagccagattgagaaagagaatggttagaaaatactgcgttttgtattttgcagtgttggtcatgcttgttgtgattattgctgctccagctgctgcatcttcacagattgcagttgaccaatttgcaaacattggaggttctggttcaattgccaatggtttgttccaaccaagaaatgtttccaacaatgacactggtccaaacagaccaaactcatactctactatgtggacctacttgagttcaaggtacactggacacactacagcatactcaaccaacccattcagataa

SEQ ID NO: 100 - DNA, 5751 bp, Magnaporthe oryzae
atgtcgggacatccaaaccagcaacggcctaacccgaacgactacgatgacggctatggccggcaacaaggaagtcagcagggaggtcaggatgcctactatgacgaccattcacagcaacagtactacgacaatggctatgacaacggtggccaaggaggtcgccgcggagatggctactacgacgaatctggctactacaacgccgatccgaacaacccctatcaacaggatggagggtactacgataaccaggatcagcagtaccaagacgattattacaaccagcaaggttactatgatcagggctatgatcagggctacggccgtcgacaaggctcagaggatgagtctgaaacgtttagcgacttcacaatgaggtcggacatgcgtggtggtgatggcgactactacgggcgtggcgacgagcgttacaacagctacaacgacggacaggctcgcggattccggcccccctcgtcccagatctcatatgctggaaaccgctcttctggggcctcgactccgaactacggcatggactatggcaatggacacgccgcgctggctaggtcacgcgagccgtatcctgcttggacctcggatgcgcagattcctctatcgaaggaggaggttgaggatattttccttgacctcacctcgaagtttggattccagcgcgacagtatgaggaacatgtacgaccatctcatgactcttctcgactcgcgtgcctcacgcatgaccccgaaccaggccctcctgtcgcttcatgcagactacattggaggtgacaacgcgaactaccgcaagtggtacttcgccgctcatctggatctcgatgatgccgtgggctttgccaacatgaagggcaagggcttgaagcgcaagaacaagaagaagaagaaggacgccgagaatgaggccgagaccctggagagcctggaaggtgatgactcgctcgaagcggccgagtacaggtggaagacacgcatgaaccgcatgtcacagcacgaccgtgtgcgacagctggccttgtacctgctctgctggggcgaagccaaccaggtccgcttcatgcctgagtgcttgtgcttcatcttcaagtgtgcggacgactacctcaactcgcctgcatgccagaacctcgtagagccggtagaggagttcacgttcctcaacaacgtcatcactcccatctaccagtacgtccgagaccaaggttacgagattgtcgacggtgtatacgttcgtcgcgagcgtgaccacaagaacattatcggttatgatgactgcaaccagcttttctggtacccggaaggtatcgagcgcattgtgttgggagacaagtcaaaactgaccgatgtgcctcccgcggaacgttacctcaagctcaaagatgtcaactggaagaagtgtttcttcaagacctacaaggagactcggtcgtggttccatctggttgttaacttcaaccgtatctggattatccacttgaccatgtggtggtactacacggcattcaacgctcctacgctcttggtccccaactacacccagcaaggaaacgaaaagccccctaacgcagctgtgtggtctatctgtggattcggtggttgtatcgcatccctgatccagatcattgctacatgctccgagtgggcgtatgtacctcgtcgttgggccggagctcagcatcttaccaagaagcttctcttccttattctcatctttgtcatcaacgccggtcctggtgtttatgtctttttgcctggaaccgttgaagccgtcagggctcgccaggagactcagatcgcgctcattctgggcattgtccagttcttcgtgtctgtggcgactttcctcttcttctccataatgccgcttggtggacttttcggcagctacctgacgaagaactctcgtcgctatgtcgcaagtcagacattcaccgccagctatcctagacttactggcaacgatatggctctctcatacctcttgtggctgatcgttttcggtgccaagatgggcgagtcatacgtctacttggctttgtctttcaaggaccctctccgctacttgtggttgatgaacgtcgacagctgtcttggtgacaccatcctgaagcagtacctgtgcacactccaacctaagattcttgctggtcttatgggagtaacagatcttattttcttcttcctcgacacatatcttttctatgtcctggttaactgcgtgttctcgattgcgcgatctttctacctgggtgcttctatcttgactccatggagaaacatcttttctcgcatgcctaagcgcatctactcaaaggtcttggcaaccacggacatggaggtcaagtacaagcctaaggtcctcatttcacagatctggaacgctatcgtcatttccatgtaccgtgagcatcttctggccatcgaccacgttcagaagcttctttaccatcaagtcccgtcggagcaggagggcaagcggactcttagggctcccacgttcttcgtgtcacaagaagatcactcgttcaagacggaatttttccccgctcagagtgaagcagagcgtcgcatttctttcttcgcccactcactgtcgacgccgattcctgagccgctgccggttgacaacatgcccacttttactgtcatgatccctcactacagcgaaaagattctcttgtcgctgagagaaattatcagggaagacgagccgtattctcgtgtcactttgctcgagtacctgaagcaacttcacccccacgagtgggactgcttcgtcaaggacaccaagattcttgcagatgagacgtctcaattcaacggcgacgagaagaatgacaaggacacagccaagagcaagattgacgatctgccattctactgcatcggtttcaagtcttcggcacccgagtacactctccggactcgtatttggtcttctcttcgctcgcagactctctaccgtaccatctccggtttcatgaactacagccgtgccattaagctgctgtaccgtgtggagaatcccgaggttgttcaaatgttcggcggtaactctgacaagttagaacgggagttggagcgcatggcgcgtcgcaagttcaagctcattgtttccatgcaacgttatgccaagttcaagaaggaggagatggaaaacgccgaattcttgctgcgtgcgtaccccgacttgcagattgcctatctcgacgaagaggcacctctcaacgaaggggaggagcctcgtttgtactctgccctgattgacggccactctgaaataatggagaacggcgcccgcaagcccaagttccgaatccagctctccggtaaccctattcttggtgacggcaaatctgacaaccagaaccactgtatcatcttctaccgcggtgaatacattcaactcatcgacgccaaccaggacaactatctcgaggaatgtctgaagattcgcagtgttttggccgagttcgaggagatgaagacggacaacacctcgccgtacactcctggtgtcaagaatgccgtcaaatcgcctgttgccatcttgggtgctcgtgagtacattttctcagagaacattggtatcctcggagacgtcgctgccggaaaggaacagactttcggaaccttgtttgctcgtacgctggctcagatcggtggcaagctccattacggtcatcccgatttcctcaacggaattttcatgacaacccgaggtggtgtatcaaaagcgcaaaagggtctccacctgaacgaggacatttacgccggtatgaatgccatccttcgtggtgggcgtatcaagcattgcgagtactaccaatgtggcaaaggtcgtgatttgggtttcggctcgattctgaacttcaccaccaagatcggcactggtatgggcgagcagatgctgtctcgcgagtactactacctcggcacgcaactcccgcttgatcgattcctgtctttctactatgctcaccctggtttccatatcaacaacatcttcatcatgttgtctatccagatgttcatgatcacactcgtcaacataggagccttgaggaatcagaccataccctgcgactacaaccgaaacgttcccatcaccgacgagctcttccctactggatgccagaacaccgacgcactagtggattgggttttcaggagtatcttgtcgattattttcgtcctctgtctgtcctatatccctctagtcgttcaggagttgacggagcgtggtttcttccgcgcggctactcgtctcgcgaagcagatctgctccctctcgcccctgtttgaagtgttcgtttgtcagatctacgccaatgcggtccataacaacctgtcattcggcggtgctcgatacattggtaccggtcgtggttttgccactgctcgcattccgttcggcgttcttttctctcgatttgccggcccgtcgatttacttcggcgcacgactactcatgatgcttatctttgctaccatgactgtttggcaaggcgctctggtatacttctacctcactctgctggctctcgtcatctcgccgttcctctacaacccccaccagtttgcttggaatgatttcttcattgactaccgtgactacctgcggtggttgtctcgtggaaactctcgatcgcacgcatcatcgtggatcgcctactgcagactctcgcgaactcgtctcactggttacaagcgaaaggccgtcggagaccccagctcgaaactctccggagacgtacctcgggcatcattcatgaacatcttccttggcgagctcgtttcaccgtttttgctggcggtcgtgatgctgattccatacctcttcatcaacgcccaaactggtgtcacggcagataaaaaccccaacttgcccacccccaaggcaagtgcagcactgctcaggatcggaatagtcgccattgccccgatcgccgtcaacgccggtgtgtgtctgatcatgttcgcaatggcctgtttcatgggtcccctactcagcatgtgttgcaagaagttcggtagcgtacttgctgccattgcacatgcttttgctgttatcatgcttctcgtcttcttcgaggcactgtatatcctccagcaatggaaggcggccccgactctgctcggaatgatcgttgttctttgcgtccaacgtttccttctgaagctgatcgtatctgccggtctgactcgagagttcaagtcggatcaggccaacattgctttctggaccggcaagtggtactccatgggctggcatacaatttcgcagccggcgagagagtttctctgcaagatcaccgagatgtccttctttgcaggcgacttcattctcggtcacattatcctcttcctcatgctgcctatcatcctcattccccaggttgacaagctgcattctatgatgcttttctggcttcgtcccagtcaacaaattcgaccccctatctactcgatgaagcagtccaagctgaggacgaggcgtgtggttcgctatgcgatcttgtacttcgtgctcctcgtactcttccttgctctgctcgcaggcccggcgatcattgtctcatttgttaaagatatgccaccaaaggccataacaaatgttaaattcctctctgattccggcctgattcaacccgccggatatgacaacaacaacacgaatttcgaacacacgggtacaagacgaaccggtcctgccttccctacttcctaa

SEQ ID NO: 101 - DNA, 5649 bp, Meyerozyma guilliermondii
atgtcgtacgataataatcacaactattatgacccgaatcagccgatgggtaatgatggttattatcaacaacaaccttatgatgatatgaaccaacaaccacatcaggaatactatgaccctaacatgcaatatcaacaacagccttatgacatggacgggtaccaagatcccaactatcagggtcaacagattcctcaacaaggatataacgctgatcctgaagcgttttctgatttcagttacgggggtcaaactccaggtactcctggttacgaccaatacggtacccagtttactccttctcagatgagttatggtggtcccagatcgtctggtgcttctacgcccatctacggtggagcaggtggaaactacgatccaacccaatttcaaatttcttccagcatgccttaccctgcttggtctgccgatgcgcaagcaccagttaaagtagagcatattgaggatattttcatcgacttggccaacaagtttggtttccaaagagattcgatgagaaatatgttcgactactttatgaccttattggactctagatcctcgcgtatgtctcccgcccaagccttattgagtttacacgcggattacattggaggtgaaaacgccaactacaaaaagtggtattttgcttcgcaacaggacttggatgaatcaattggttttgccaacatgaaaatgggaaaggttggtaagaaagctagaaaggcatccaagaagtccaagaaggcaagaaaggcagtcgaggaacatggccaggacattgacgctttggctaatgaattagaaggcgactactctttggaagccgcagaaattagatggaaagccaagatgaactctttgtctcctgaagagagaattagagacattgctttgtatttgttgttgtggggtgaagccaatcaagttagatttactcctgaagcaatttgttacatctacaaaacggcattcgattacttgatgtctcctcaatgtcaacaaagacaagaacctgttccagaaggtgattacttgaatcgtgtcatcacacctttgtaccgattctttagatctcaagtttacgaaatctacgagggccgtttggtcaagcgtgaaaaggatcacaacaaggtgattggttacgatgatgttaaccagttgttctggtacccagaaggtatttcaagaattatctttgaagatggtactagattgattgacgttccacctgaagagcgttacttgagatttggtgaggtcgaatggcacaatgtcttctttaagacttacaaggaaattagaacttggttgcatcttatcactaacttcaacagaatctggatcatccacggtactgtctactggatgtatactgcttacaactccccaacgttgtacaccctccattatgttcaaactgttaacaatcagcctcttgcttcatcgagatgggcggccgctgctatcgctggtgtattggctgcgttcattcaaattgctgcaacggtgtgtgagtggatgttcgttcccagagaatgggctggtgctcaacatttgactcgtcgtttgatgttcctcattattatcttcgtggttaacttggccccaattgttttcacattctactacgctggcttggctgcaaagtcaaaagcagcgctagtggtttcgattgttgggttcttcattggtattgccacgattgtattctttgccgttatgcctttgggtggtttgttcacaagttatatgaacagaagatcaagaagatatttggcttctcaaaccttcactgctaacttcaacaagttgactggcttagacatgtggttatcttatttaatgtgggttcttgtgttctttgccaagtacatcgagtcttatttctttatggctttgtccttgagagatcctatcagaaacttgtctaccgctaacatgagatgtgtcggtgaagtctggttcggtgacaaattgtgtaaacaccaagctaaggttgttttgggtttgatgtaccttgtggacttgttattgttctttttggatacctacatgtggtacattatttgtaactgtgtgttttccattggacgttcattctatttgggtatttctatcttgacaccttggagaaacattttcacaagacttccaaagagaatctactctaagattttggctaccactgagatggagattaagtacaaaccaaaggttttgatctctcaaatctggaatgctattgtgatttccatgtacagagaacatttgttggctattgatcacgttcaaaagttgttgtaccaccaagttccatctgaaattgagggtaagagaactttgagagctccaactttcttcgtttctcaggatgacaataacttcgagacggagttcttcccaagaaactctgaagctgagagacgtatctctttctttgctcaatccttggctacaccaatcttggaaccattgccagttgacaacatgcctacctttactgtgtttactcctcactactctgaaagaattttattgtctttaagagagattattagagaggatgaccaattctcccgtgttaccttgttagaatatttgaaacaattgcacccagttgaatgggactgttttgtcaaggacaccaaaattttggcggaagaaactgctgctttcgaaggtgaaggtgtcgacaaagagtctgaagatggcctcaaatctaagattgatgatttgccattctactgtattggtttcaagtctgctgctcctgagtatacattgagaacccgtatttgggcttccttgagatcccaaaccttgtaccgtaccgtttccggtttcatgaactatgccagagccatcaaattgttgtaccgtgttgagaatccagaattggttcaatatttcggtggagacccagagggccttgaactcgcattggagagaatggcaagaagaaaattcaagtttgttgtttcaatgcaaagattggccaagtttgaagactgggagatggagaatgctgaatttttgttacgtgcttaccctgacttgcaaatcgcttacttagacgaagagcctgccttatccgaagaggaagatccaagaatctattccgctttgattgatggtcactgtgaaattttggagaatggtagacgtcgtcctaagtttagagtgcaattgtctggtaacccaattttgggtgatggtaagtctgataaccaaaatcatgctttgattttccaccgtggtgagtacattcaattgattgatgccaatcaagacaactacttggaagaatgtttgaagatcagatctgtgttggccgaattcgaagaattgaacgttgaacaaattaacccatatgctcccaacttgaagactgatgtcaaaactggaaacaatgcccctgttgctatcttgggtgctcgtgaatacattttctcagagaactctggtgtcttgggtgatgtcgctgctggtaaggaacaaacattcggtacccttttcgcaagaactttggcacaaattggtggtaaattgcattatggacatcctgatttcttgaatgccacttatatgttcaccagaggaggtgtttctaagggacaaaaaggattgcatttgaacgaagatatttatgctggtatgactgctatgttaagaggtggtagaatcaagcactgtgaatactaccagtgtggtaagggtagagatatgggtttcggatccattttgaatttcacaaccaagattggtgctggtatgggagaacagatgttgtctcgtgaatattactacttgtcgactcagcttcctttggacagatttttgtccttcttctacggtcatccaggtttccatattaacaacttgttcattcaattatctttgcaagttttcatgttggtgttggctaacttgaacgcattggctcacgaatccattatctgttcctacaacagaaacacccctatcaccgatgtgttatatccttacggttgttacaactttgcccccgcggttgactggattagacgttacacattgtctattttcattgtgttcttcattgcgttcatcccattggtggttcaagaattgattgaaagaggtgttttgaaggcagctcaaagattctgtcgccatcttatctcgttgtcgccaatgttcgaagtgttcgttgctcaaatctactcgacttcattgattactgatttgactgttggtggtgccagatatatctccactggtagaggtttcgccacttctcgtattccattctccatattgtactcccgttttgctgattcatcgatttacatgggttcaagatctatgttgattttgttgttcggaactgtttcccactggcaagctccattgttgtggttctgggcatcgttgtcatcattgatgttctcaccatttatcttcaaccctcatcaattttcttgggaagatttcttcatcgattaccgtgactttatcagatggttatcccgtggtaactccaagtggcatagaaactcttggattggttacgctcgtctttccagatctcgtgtcactggtttcaagagaaagttgactggcgatgtatcggagaagggtgctggtgatgcttccagagcacacagatccaacgttttctttgccgactttttgcccactttgatctacactgccggtcttttcgttgcctacactttcatcaacgctcagactggtgtaagaaggggaccaaatggtgagggtagtcctactgaggtcaactctgtgttgagagttgtgatttgttctttggctcctgtcgttattgatctcggtgttttggcaggatgtcttggtctcgcttgttgcgcaggtccattattgggattgtgctgcaagaagactggttctgtgattgccggtgttgctcatggtattgccgttgttgtgcacttggtctttttcattgtcatgtgggtcttggaaggcttcaactttgctagaatgttgttgggtctttgtaccatggtttacatccaaagattgttgttcaagttcttgacgatttgcttcttgaccagagagttcaagaacgataaatctaaccaagctttctggaccggtaaatggtacggatctggtttgggatggatggccttcacacaaccagctcgtgaattctgtgccaaggttattgaaatgtcggagtttgccggagactttattttggcacacatcatcttgtttgtgcaattgcctatcatctgtattccattgattgacagatggcattcgaccatgttgttctggttgaaaccttccagattgatcagacccccaatctactcattgaagcaggccaagttgagaaagagaatggtgagaagatactgtactctttactttttgattttggttatctttgttgcacttattgctgcacctgctgctattggtaacaccactcttgtaccagaagacttgggtaaatcgttgaagggtacttttgctggattgttccaaccaagacacgttgaaaacaatgacactggtactactgtgggcaaggcttacatgagtctgcacacgttctggaccaacactcctactcacaagagcactaaatataccaccaagccataa

SEQ ID NO: 102 - DNA, 6218 bp, Nectria haematococca
atgtcgggatacccaggcggtggtcaccatgaccagtatgatgatggctacggccgtcagcctcaacagggagggaatcagcaaggcggaaacactgactcctactaccaagacgatcagtattatgaccagggttacgacaaccacggtcgcaatgagggctactatgatgaatctggctactacaacgccgatcccaacaacccttaccaccaagacggaggctactacgatggccaggaccagtaccaggacgactactatggcaatggccaaggccaaggtcagggccagggcggatactacgaccaggactacgaccggggctacaacggccagggtggccgccatggctctgaggaggattccgagacctttagtgactttaccatgagatccgacatggcccgcgctgctgagatggattactatggtcgaggcgatgagaattacaacggttacggcgacggccaacgtggctaccgacctccttcgtcgcaagtctcctatggtggaaaccgctcttccggtgcttctacccccaactatggaatggattacggaaatgtccttcctgctggtcaacgctcccgagagccctatcccgcctggacctccgacgctcagatccccctgtccaaggaagaagtggaggacatctttctcgacttgacctccaagttcggtttccagagggacagcatgcgcaacatgtatgaccacttcatgattctgctcgactcgcgagcctcccgcatgacccccaaccaggcgcttctttcgctccacgccgattacattggtggtgacaatgccaactatcgcaagtggtactttgctgctcatctcgatcttgatgatgctgttggtttcgccaacgctaaggggctcaatctgaagcgcaagggcaagaagaagaagaaggatgccgctgccaacgaggccgagaccctgcaggacctggagggcgacgacagcctcgaggctgctgagtatcgctggaagactcgcatgaaccgcatgtctcagcacgaccgtgtccgccaaatcgccttgtacctgctgtgctggggtgaggccaaccaggtccgattcatgcctgagtgtttgtgcttcattttcaagtgcgccgacgattacctcaactcgcctgcgtgccaggctctcgttgaaccggtcgaggagttcacctatcttaacaacgttatcactcccctgtaccagtacctccgagaccagggttacgagattctcgatggtgtttacgttcgtcgcgagcgtgaccacaagaacattattggttatgatgactgcaatcagctcttctggtatcccgagggcattgaccgcctcgtcctgcaggataagagcaagctgatcgatgtgccgcccgccgagcgatacatgaaactgaaggacgttcactggaagaagtgcttcttcaagacgtacaaggagtctcgttcttggttccatttgatcgtcaacttcaaccgtatctggatcattcatttgaccatgttctggttctacacttcccacaacgccccgaccctcctcgtcaaggactacgagcagcaggtcaaccagtctccaccgacaagcaaggccttctctattgttggtttcggcggtgccattgcttctctcatccagcttatcgcgaccattgctgaatgggcctacgttcctcgacgctgggcaggcgctcagcacttgatgaagcgattcttcttcatcctcctggtcttcatcctcaacgtcgcccctggtgttctcgtctttgggttctcgagcttgctcaaggagagtatcctcaagattgttggtattgttcacttcatcatcgccatcatcacgttcatctttttctccatcatgcctctcggtggactgttcggcagctacatgagcacgaagactcgtcgctatgtagccagtcagactttcactgctagttggcctgtgttgaagggaaatgacatggccatgtcttacggactgtgggctgtcgttttcggtatcaagatgggtgtctcgtacacttatctgattctgtctttccgtgatcctgtccgatatctggccatcatgaacgtcgacagctgcctgggcgacaacctactgttgaagggtgaactttgcaagtggcatcccaccattgtcttggctctgatggctttcaccgacgtcatcttcttcttcctcgatacctatctgtggtatgtgttgctcaacacgctcatgtcggttgcccgctctttctacatcggttcttctatctggactccctggaggaacatcttctctcgcctgcccaagcgtatctactccaaggtcctcgccacaaccgacatggagatcaagtacaagcccaaggttctcatctcgcagatctggaacgctatcgtcatctccatgtaccgcgagcatctcttggccatcgaccacgtccagaagctgctttaccaccaggttccttcggagcaggagggcaagcgaactcttcgtgctcccaccttcttcgtctcgcaggaagatcactccttcaagaccgagttcttccctagctacagcgaagctgagcgccgaatctccttcttcgcccagtctctgtccacccccatgccagagcccgttccagttgacaacatgcccaccttcactgtcatgattccccactacagcgagaagattctcctgtcgctccgtgagattattcgcgaggatgagccctactctcgtgtcaccctccttgagtacctcaagcagcttcaccctcacgagtgggattgctttgtcaaggacaccaagattcttgccgacgagacctcgcagtacaacggcgacgagaacgacaagggcgagaaggacacagccaagagcaagattgacgaccttcccttttactgcattggtttcaagtcttcggctcctgagtacactctccgcacccgtatctgggcctctctccgcttccagactctgtaccgtaccatctctggtttcatgaactacagccgtgccatcaagcttctctaccgcgttgagaaccccgaggttgttcagatgttcggaggcaacacggataagcttgagcgcgagctcgagcgaatggcccgccgcaagttcaagattgtcgtctctatgcagcgatactccaagttcaagaaggaggaaatggagaacgccgaattccttctccgcgcttaccccgaccttcagattgcctacctggacgaggaggcccccaccgccgaaggcgaggagcccaagctctactccgttttggtcgatggccattctgagatcatggagaacggcatgcgtcgacccaagttccgtgttcagctctctggtaaccccattctcggtgacggaaagtccgacaaccagaaccactccatcatcttctaccgtggcgagtacatccagcttatcgacgccaaccaggacaactatcttgaggagtgtctgaagattcgcagcgttctcgccgagttcgaggagatgaagaccgacaatgtttccccctatacccctggtgtcaagaacgaagtccgatctcccgttgctatcctcggtgctcgcgagtacattttctcggagaacattggtattcttggtgacattgctgccggaaaggaacagacattcggtactctctttgctcgaaccatggctcagattggtggcaagctgcattacggacatcccgatttcctcaacggtgttttcatgacgacgcgtggtggtgtttccaaggctcagaagggtctgcatcttaacgaggatatttacgccggtatgacagccctcctccgcggaggacgtatcaagcagtgcgagtacttccagtgtggtaagggtcgtgatttgggtttcggttccgtcctcaacttcacaaccaagatcggcacgggtatgggtgaacagttcttgtctcgcgagtactattacctcggcactcagcttcctctggatcgtttcctctccttctactacgcccatcctggtttccatctgaacaatatgttcattatgttctcggttcagatgttcatgattactcttgtcaacctgggagccctccgccacgagaccattccttgcaactacaaccgagacgtgcccatcaccgaccccctcttcccaactggttgtgccaacactgatgcgctcacggactggatctaccgctgcgttgtctcgattcttttcgtcctgattctctccttcatcccgcttatcgtccaggagtgcatggaacgtggtgcttggcgcgctgctctccgtctcaccaagcagttctcgtcgctctctctcatgttcgaagttttcgtctgtcagatctacgcgaactctgtgcagcagaacgtttcgtttggtggtgcgcgatacattggtaccggtcgtggtttcgccacagctcgaattccctttggtgttctctactctcgattcgcaggccctgctatctactttggagcccgacttctaatgatgcttctctttgcgacgctcacggtttggaagggcgttctcatctacttctggctcactctgctggccctgaccatctcgcctttcctgtacaacccccatcagttcgcctggaacgatttcttcatcgactaccgagactacctccgctggctctcacgtggtaactcgcgaagccatgcctcgtcctggatctcgtactgccgactctcgcgaactcgcatcacgggttacaagcgcaagactctgggcgacccttcagccaagatgtcagctgacgtcccacgagctccgcttgctaacatcttcttcagcgagatcttttcgcctctgatgctggctgttgtgacgattcttccctatctgttcatcaacgcccagactggtgttgtggccaggatccaacccgatgatgtcaagaccaagatccagccgactgactcgctcattcgcctgctcatcatctcgttcgctcccattggtgttaacgcaggtgtccttgccgctatgttcggtatggcctgctgtatgggaccagtgcttagtatgtgctgcaagaagtttggcagtgtccttgctggtattgcgcatgccacctcagtcatcttcctcctcatctcattcctgggcatgttcgttcttgagggcttcaacttttcgcgaacgatggctggaatgatcgctgctaccgcgattcagcgattctttgtcaagcttatcgtgtctttggctctgactcgtgagttcaagtcagacacgtccaacatcgccttctggaccggaaagtggtactctatgggatggcacagcatgtctcagcctgcccgagaattcctttgcaagattaccgagttgtccatgttctcagccgactttattctcggccactggctcctcttcttcatggctcctgtcatcttgatccccaaggtcgacatgctgcactctatgatgctgttctggcttcgtcctagccgtcaaattcgacctcctatctactcgatgaagcagtccaagcttcgccgcagacgcgtgattcgctatgccatcctctacttcaccctgctgatcgtgttcatcgcgctcattgtcggacccgtggttgccggcaagtatataggagataccatctcgtcgtcactgggcggcctcggcttcaacctggtgcagcctacggatctcaagcacgacaacaccaacagtacgtcacagactggtactggaatggcaggctacactggagctggcaagtccaagacgactggtgcccaagcctcggtcacggccaagatcaagctgttttaaggggtggaataagggggcaacagagcccaccacacaacctttgaaaagacaagagtctatgcttttggacaaggttcacgattgcgtggctgtcagcgagttgcatgcattcatgggcgcatccaagtcttttcgtcggttctattgttgttgttgttgtttttcgaaagttaaagaaattgcaaggggttcatgttttcgttatcttccttttggtcctgcaccgcacatgatcaagtttatagacagaggatgaggagagacgacgaatcagaccaagctttcgctggctgaactgggctgagagatcttttttggagggaaggcgcattttttacctctttctaatgtgtactatgaaaggaaaaacacatggcaatttttagacgcaaatgcaaataatgttgaac

SEQ ID NO: 103 - DNA, 6218 bp, Nectria haematococca; identical to SEQ ID NO: 102

SEQ ID NO: 104 - DNA, 662 bp, Neurospora crassa
gctttaattgatggtcattgtgaaattctagataatggtcgtagacgtcccaagtttagagttcaattatctggtaacccaattcttggtgacggtaaatctgataaccaaaaccatgctttgattttttacagaggtgaatacattcaattaattgatgccaaccaagataactacttggaagaatgtctgaagattagatctgtattggctgaatttgaggaattgaacgttgaacaagttaatccatatgctcccggtttaaggtatgaggagcaaacaactaatcatcctgttgctattgttggtgccagagaatacattttctctgaaaactctggtgtgctgggtgatgtggccgctggtaaagaacaaacttttggtacattatttgcgcgtactttatctcaaattggtggtaaattgcattatggtcatccggatttcattaatgctacgtttatgaccactagaggtggtgtttccaaagcacaaaagggtttgcatttaaacgaagatatttatgctggtatgaatgctatgcttcgtggtggccgtatcaagcattgtgagtattatcaatgtggtaaaggtagagatttgggtttcggtacaattctaaatttcactactaagattgggattggtatgggtgaaaaatg
